(19) United States
(12) Patent Application Publication
(10) Pub. No.: US 2003/0170625 A1
(43) Pub. Date: Sep. 11, 2003

(54) Detection of differential gene expressions

(75) Inventors: Andre Rosenthal, Berlin (DE); Bernd Hinzmann, Berlin (DE); Reinhold Schaffer, Berlin (DE); Johannes Zuber, Berlin (DE); Oleg Tchernitsa, Berlin (DE); Martin Grips, Berlin (DE); Martin Hellriegel, Berlin (DE); Anne-Chantal Schmitz, Bonn (DE); Christine Sers, Berlin (DE)

Correspondence Address: MILLEN, WHITE, ZELANO & BRANIGAN, P.C., 2200 CLARENDON BLVD., SUITE 1400, ARLINGTON, VA, 22201, US

(73) Assignee: metaGen Gesellschaft fur Genomforschung mbH

(21) Appl. No.: 09/930,213

(22) Filed: Jan. 31, 2001

(30) Foreign Application Priority Data
Jan. 31, 2000 (DE) 100 04 102.7

(51) Int. Cl. C12Q 1/68; C07H 21/04

(52) U.S. Cl. 435/6; 536/23.2

(57) ABSTRACT

The invention relates to a process for detecting differential gene expressions and new nucleic acid sequences that can be obtained by this process.

### DESCRIPTION

[0001] The invention relates to a process for detecting differential gene expressions and new nucleic acid sequences that can be obtained by this process.

[0002] The genetic complexity of the cellular transformation on the level of the mRNA expression was first described more than 10 years ago (see, e.g., Groudine and Weintraub, PNAS USA 77 (1980), 5351-5354; Augenlicht et al., Canc. Res. 47 (1987), 6017-6021). Global sequence data with respect to the gene activity altered in the pathogenesis of human cancer were obtained only recently, after new methods for determining gene expression profiles were developed (Zhang et al., Science 276 (1997), 1268-1271; Chang et al. Oncogene [oncogenes] 16 (1998), 1921-1930; by Stein et al., Nucleic Acids Res. 25 (1997), 2598-2602). Complex gene expression profiles on which the numerous tumor-specific cell functions are based are adjusted at least partially by the accumulation of multiple genetic alterations in the abnormally activated signal transduction methods and transcription factors (Fearon and Vogelstein, Cell 61 (1990), 759-767; Stanbridge, Annu. Rev. Genet. 24 (1991), 615-657).

[0003] A more important aspect of the multistage tumorigenesis is the activation of members of the Ras-gene family that is produced by mutations. Ras-mutations are associated with an adverse tumor prognosis (Mao et al., Cancer Res. 54 (1994), 1634-1637; Sasaki et al., Cancer Res. 53 (1993), 1906-1910; Yaginuma et al., Gynecol. Oncol. 46 (1992), 45-50; Ahnen et al., Cancer Res. 58 (1998), 1149-1158). Ras-mutations are especially common in the case of sporadic tumor diseases of the pancreas, colon, lungs and the myeloid system (Boss, Canc. Res. 49 (1989), 4682-4689).

[0004] The Ras-gene products are small GTP-binding proteins that influence the transcription globally by acting as “main switches” in signal transduction processes, in which extracellular signals are linked with processes in the nucleus (Abdellatif et al., J. Biol. Chem. 269 (1994), 15423-15426; Malumbres and Pellicer, Frontiers in Bioscience 3 (1998), 887-912). In normal cells, the concentration of Ras-GTP in reaction to the binding of growth factors, cytokines or other ligands of membrane-bonded tyrosine kinase receptors increases transiently. The conversion into the inactive, GDP-bonded form of Ras is carried out by its low intrinsic GTP-hydrolysis activity and is accelerated by additional Ras-GTPase-activator proteins (GAP). Oncogenes, in the amino acid codons 12, 13, 59 or 61-mutated forms of Ras, are insensitive to GAP-stimulation and are consequently held in their active state (for an overview, see Malumbres and Pellicer (1998), supra, Marshall, FASEB J. 9 (1995), 1311-1318; MacDonald and McCormick in: Oncogenes and Tumour Suppressors, Eds. Peters, G. and Vousden, K. H., 121-153, Oxford University Press, Oxford 1997). The Ras-GTP amounts are increased even in tumors that contain no activator mutations (Patton et al., Cancer Res. 58 (1998), 2253-2259; Clark and Der, Breast Cancer Res. Treat. 35 (1995), 133-144). In the absence of intrinsic mutations, the Ras-signal transduction method can be stimulated by inactivating mutations of the Ras-regulator NF-1 GAP in the neurofibromatose type I (DeClue et al., Cell 69 (1992), 265-273) by complexing of effector proteins that have an upstream effect with the Bcr-Abl protein tyrosine kinase in chronic myelogenic leukemia (Puil et, al., EMBO J. 13 (1994), 764-773) and by direct association of Ras with the STP-C488 protein of the DNA tumor virus herpes saimiri (Jung and Desrosiers, Mol. Cell. Biol. 15 (1995), 6506-6512).

[0005] On the cellular level, two main changes are observed as a result of the Ras-activation: mitogenesis and reorganization of the cytoskeleton. A permanent activation of Ras produces an enhancement of the normal cellular reaction. Essential signals for the cellular transformation, invasiveness, angiogenesis and metastasizing are transduced downstream from Ras by branched signal paths. These signal paths comprise the Raf/Mek/Erk cascade of cytoplasmatic kinases, the signal path that contains the small GTP-binding proteins Rac/Rho, the PI3 kinase signal path, i.a. Via these signal paths, various transcription factors, such as, for example, Elk 1, SRF, Jun, ATF2 and NFkB, are stimulated (for an overview, see, e.g., Khosravi et al., Adv. Cancer Res. 72 (1998), 57-107).

[0006] In view of the complexity of the non-linear Ras-signalling and the extremely large number of potential targets, there is a great need to provide a process that allows a determination of the transcriptional changes that are associated with a Ras-transformation. In addition, this process should also be used for the analysis of transcriptional changes that are produced by other processes.

[0007] To solve this problem, the concentrations or amounts of individual transcripts in phenotypical normal 208 F rat fibroblasts (Quade, Virology 98 (1979), 461-465) were determined with those in the H-Ras-transformed cell line FE-8 derived from, 208 F-cells (Greigel et al., Int. J. Canc. 38 (1986), 697-705) using a PCR-based cDNA substraction method, subtractive suppression hybridization (Diatchenko et al., PNAS USA 93 (1996), 6025-6030). This process allowed, surprisingly enough, an efficient isolation of known genes—and of special importance—the isolation of new sequences. The two cell lines that are used are closely related, quasidiploid cell lines to keep transcriptional changes as few as possible based on structural and numeric chromosomal aberrations, which are not directly associated with the Ras-induced transformation. The cDNA fragments (n=1257) that are obtained in this way after forward- and backward-substraction were sequenced and arranged in an array. After reverse or conventional Northern Analysis, an H-Ras-specific expression profile that comprises new sequences (n=45), expressed sequence tags (n=104) and known genes (n=244) was established. Then, this gene profile was used for the comparison of mRNA expressions between H-Ras-transformed 208 F-cells and with cells that were transformed by two other tumor-associated Ras-isoforms K-Ras and N-Ras. Moreover, target genes (n=61) were identified, whose transcriptional changes are adjusted by the Ras/Raf/Mek-signal paths.

[0008] A first aspect of the invention relates to a process for determining transcriptional changes in a cell, especially in a mammal cell, such as, for example, a rodent cell or a human cell, associated with a physiological change, e.g., a transformation, preferably a Ras-mediated transformation, relative to another cell that does not exhibit this specific physiological change. The process for differential transcription analysis is characterized in that mRNA is obtained from a first cell and a second cell, a subtractive suppression hybridization is performed with the mRNA that is obtained, and a population of genes expressed differentially in both cells is identified, whereby the first and the second cell are distinguished relative to a physiological change that is to be examined. In addition, the process preferably comprises a verification of the differential expression, preferably by reverse and/or conventional Northern Blot analysis.

[0009] As a first cell, preferably a transformed cell is used, and as a second cell, preferably a non-transformed cell is used. An Ras-transformed cell is especially preferably used as a first cell, and a non-transformed cell is especially preferably used as a second, whereby as a Ras-transformed cell, especially a cell that is transformed with a mutated Ras-gene product, for example an H-Ras-, K-Ras- or N-Ras-transformed cell, is used.

[0010] The first cell and the second cell preferably are derived from the same species, especially a mammal, such as, for example, a rat, mouse, human, etc. In addition, the first cell and the second cell are preferably derived from the same cell type, for example fibroblasts. Moreover, it has proven advantageous to use a first cell and a second cell that essentially have no chromosomal aberrations that could possibly distort the pattern of the differential gene expression caused by the physiological change that is to be examined, e.g., the Ras-transformation.

[0011] Subtractive suppression hybridization is a technique based, on nucleic acid amplification, e.g., a PCR-based technique, which comprises a reverse transcription step, in which the differentially expressed transcripts are converted into cDNA molecules. Another characterization of the differentially expressed genes can comprise an at least partial sequence analysis of the identified cDNA molecule and an adjustment with sequence data bases such as Genbank, EMBL or EST.

[0012] By the process up until now, 1257 cDNA sequences were obtained by forward-subtraction (normal 208 F-cells minus transformed FE-8 cells) and backward-subtraction (transformed FE cells minus normal 208 F cells). From this, a total of 823 individual sequences were identified, of which 427 correspond to known genes and 303 correspond to expressed sequence tags. To date, 93 sequences are unknown. The differential expression of 39.3 (47.8%) genes and gene fragments was verified by Northern Analysis. Moreover, 236 cDNA sequences corresponding to only very small concentrations of transcripts that occur were obtained. With high probability, a portion of these sequences (>100) also has a differential expression.

[0013] The population of preferably at least 100 differentially expressed genes that can be obtained by the process according to the invention using cDNA subtraction can be used in a new way, e.g., by arrangement in arrays, to study the relationship between a signalling molecule and a transcription target on the level of transcription. In this way, the number of biologically relevant targets in the studied cells can be reduced to a limited number of genes that then can be thoroughly examined on their involvement in specific aspects of the respective physiological change, e.g., the tumorigenesis.

[0014] A subject of the invention is a nucleic acid, characterized in that it shows a differential expression in tumor cells and normal cells, comprising

[0015] (a) one of the nucleic acid sequences shown in FIG. 11,

[0016] (b) partial sequences thereof with a length of at least 50, preferably at least 100, and especially preferably at least 200 nucleotides,

[0017] (c) a sequence that hybridizes with a sequence that consists of (a) and/or (b) under stringent conditions, and/or

[0018] (d) a sequence that is complementary to a sequence that consists of (a), (b) and/or (c).

[0019] The process according to the invention makes it possible to identify genes whose expression in the Ras-transformed cells is enhanced in comparison to the non-transformed cells. These genes preferably comprise the corresponding nucleic acid sequences (T-clones) that are indicated in FIG. 11 or partial sequences thereof with a length of at least 50, preferably at least 100 and especially preferably at least 200 nucleotides.

[0020] In addition, the process according to the invention makes it possible to identify genes whose expression in the Ras-transformed cells is reduced in comparison to the non-transformed cells. These genes preferably comprise the corresponding nucleic acid sequences (N-clones) that are indicated in FIG. 11 or partial sequences thereof with a length of at least 50, preferably 100 and especially preferably at least 200 nucleotides.

[0021] In addition to the nucleic acid sequences that are indicated in FIG. 11 and partial sequences thereof, the invention also comprises nucleic acid sequences, which hybridize under stringent conditions with one of the nucleic acid sequences indicated in FIG. 11 or partial sequences thereof (as indicated above). The term “hybridization” according to this invention is used as in Sambrook et al., Molecular Cloning. A Laboratory Manual, Cold Spring Harbor Laboratory Press (1989), 1.101-1.104). According to this invention, we thus speak of hybridization under stringent conditions, if, after washing for one hour with 1×SSC and 0.1% SDS at 55° C., preferably at 62° C. and especially preferably at 68° C., especially for 1 hour in 0.2×SSC and 0.1% SDS at 55° C., preferably at 62° C. and especially preferably at 68° C., a positive hybridization signal is observed. This invention comprises a nucleotide sequence that hybridizes under such washing conditions with a nucleotide sequence shown under FIG. 11.

[0022] In particular, this invention also includes genes that are homologous to the nucleic acid sequences shown in FIG. 11, especially homologous genes from other species, especially human genes, or allelic variations of these genes. Such sequences preferably hybridize under the above-indicated conditions with the nucleic acid sequences that are shown in FIG. 11.

[0023] The genes that are identified by the process according to the invention or their transcripts or gene products are suitable as targets for diagnostic or therapeutic purposes, especially for tumor diagnosis or tumor therapy. Diagnostic applications comprise a qualitative or quantitative determination of the presence, the amount, the activity or the localization of the nucleic acid or the gene product according to known methods. Therapeutic applications comprise, for example, a modulation of the expression of the nucleic acid, e.g., by gene-therapy administration of nucleic acid or an administration of antisense-RNA or ribozymes. In addition, the amount, activity and/or localization of the polypeptide coded by the nucleic acid can also be modulated, e.g., by administration of the polypeptide or an activator thereof or by administration of an antibody that is directed against the polypeptide, e.g., in the form of a conjugate with radioisotopes or cytotoxic substances, or an inhibitor of the polypeptide.

[0024] In addition, the process according to the invention makes it possible to identify genes that show a differential expression in cells transformed by different Ras-isoforms. The gene expression was thus examined in different cells that respectively express one of the three predominant mutated Ras-isoforms H-Ras, K-Ras and N-Ras. In this case, an identical pattern of positive and negative changes for 237 genes (90%) was found. 26 genes, however, showed an isoform-specific expression pattern.

[0025] In addition, the process according to the invention makes it possible to identify genes that show a differential expression in cells that are treated with an active substance and untreated cells, especially tumor cells. As active substances, basically any substances, especially pharmacologically active substances that show an effect on the transcription in the cell, can be used. Preferred examples of active ingredients are modulators, i.e., activators or inhibitors of tumorigenesis. Especially preferably modulators of the Ras-activity are used.

[0026] In this embodiment of the process according to the invention, the influence of active substances that have been added to the first and/or second cell can be tested on the population of differentially expressed genes. When MAP-kinase inhibitor PD98059 was added to a Ras-transformed cell, it was found, for example, that the transcription of 61 genes is significantly decreased in comparison with untreated cells and was attributed at least partially to the level before the transformation.

[0027] The sensitivity of the transcriptional modulation of these genes with respect to the inhibition of a signalling by the MAP-kinase defines a subclass of Ras-sensitive targets, which are adjusted by substrates of Erkl/Erk2 and are probably directly responsible for the transforming properties of the cell. The 116 genes that are not affected by the inhibitor are presumably adjusted by MEK-independent signal transduction paths downstream from the Ras.

[0028] Surprisingly enough, it was possible to identify an unexpectedly high number of genes, which can counteract a malignant proliferation, by the process according to the invention. These genes that are identified by the differential, expression analysis are tumor suppressor genes of Class II, since they are not a primary target of tumor-initiating mutations. Instead of this, the genes of Class II are distinguished in that their expression is adjusted by genes of Class I that code for transcriptional regulators, such as, for example, oncogenic transcription factors or repressors, and can be the subject of a mutation. An enhancement of expression of transformation suppressor genes of Class II can block the transformed phenotype of Ras-expressing cells (Sers et al., J. Cell. Biol. 136 (1997), 935-944). A functional connection between a permanently activated Ras-signalling and the repression of Class II suppressor activity thus exists.

[0029] Notably, it was possible to find more than ten negative growth regulators in an independent expression profile by subtraction of 208 F cDNA (driver) from REF-52 cDNA (tester). REF-52 cells are distinguished in that they activate a premature aging program in reaction to H-Ras expression (Serrano et al., Cell 88 (1997), 593-602) and have high mRNA concentrations of negative regulators, which are not expressed in 208 F-cells.

[0030] In addition, the invention is explained by the figures and examples below.

### DESCRIPTION OF THE FIGURES

[0031] FIG. 1 shows an overview of the DNA libraries obtained after forward- and backward-subtractions. Sequence analysis:

[0032] homology studies were performed with use of the BLASTN program against the NCBl Non-Redundance and EST data bases. Similarities relative to a data base sequence were defined as a sequence identity of >95% over a region of 150 to 1000 bp as a function of the cDNA insert length.

[0033] FIG. 2 shows an overview of differentially expressed sequences confirmed by reverse (R) and/or conventional Northern Blot analysis (N, T). Sequence identity, species and access number are listed in order of best correspondence in the Blast analysis. Species abbreviations: H, human; M, mouse; R, rat; C, chicken; HA, hamster; X, Xenopus laevis. Redundancy means the number of individual cDNA clones, which correspond to an identical gene in the BLAST analysis. Numbers N1-N70 correspond to the genes that are adjusted down by Ras-transformation as shown by Northern Blot in FIG. 7. Numbers T1-T74 correspond to genes that are adjusted up as shown in FIG. 7. The amounts of mRNA were analyzed by densitometry. The indicated numbers correspond to the ratio of densitometric values (volume analysis) of 208F compared to FE-8 mRNA (extent of downward-adjustment, left section) and FE-8 compared to 208F mRNA (extent of upward-adjustment, right section). A value of 30 or more shows that a transcript cannot be detected in one of the studied cells. The following cDNA fragments were not detectable in the case of reverse or conventional Northern Blot analysis. 208 F specific clones: p190-B (access no. U170032, SLIT-2 (AF141386), Slugh Zinkfinger (U79550), Semaphorin E (AB000220), GLE-1 (AF058922), TID1 (AF061749), ARF-GEP1 (AF023451), DEAD Box RNA helicase-like protein (NM-004398); FE-8-specific clone; G21 protein (AF131207), p68 RNA helicase (X 65627), LZTR-1 (D38496), Smcx (Z29651), SHMT (L11932) and CRK SH3-protein/C3G (D21239)

[0034] FIG. 3 shows Ras-target genes, which react to an MEK-inhibition by PD98059. Left column: preferentially expressed in normal 208 F-cells and genes that are adjusted down in H-Ras-transformation; right column: genes up-adjusted in H-Ras-transformation. Transcript amounts: O, mRNA not detectable in Northern Blots with whole RNA; +to +++, low, medium or high mRNA expression. The sequences that are referred to as a to e were used as samples in the Northern Blots shown in FIG. 8.

[0035] FIG. 4 shows specific changes in transcriptional Ras-isoforms. Transcript amounts: O, mRNA not detectable in Northern Blots with whole RNA, +to ++++, low, medium, high or very high RNA expression. The sequences that are referred to as f to i were used as samples in the Northern Blots shown in FIG. 8.

[0036] FIG. 5 shows properties of cells that were used for the identification of Ras-transformation targets.

[0037] a) Morphology of normal 208 F fibroblasts and H-Ras-transformed FE-8 cells untreated and incubated with the MEK-inhibitor (PD98059). Phase contrast, 100×magnification.

[0038] b) DNA histogram of 208F and FE-8 cells obtained with continuous-flow cytometry. Abscissa: fluorescence intensity; ordinate: numbered cells; the numbers relate to the proportion of cells (%) in various phases of the cell cycle. The 208 F and FE-8 rat cells showed a pseudo-diploid karyotype without significant numerical chromosomal aberrations.

[0039] c) Anchor-independent proliferation of cells in cultures on poly-hema-coated surfaces. Ordinate: absorption at 490 nm.

[0040] d) Western Blot analysis of the 21-Ras expression and

[0041] e) The Phospho-p44/42 MAPK expression.

[0042] FIG. 6 shows a Reverse Northern Blot analysis of subtracted cDNA fragments. Representative example of 93 arranged ESTs, which were obtained from a 208F-FE-8 subtracted library (N-clone).

[0043] a) Hybridization sample: ³²P-labeled 208 F cDNA,

[0044] b) Hybridization sample: ³²P-labeled FE-8 cDNA. Control-DNAs: cloning vector PCR2.1 (filter position D22), GAPDH (D23), H-Ras (D24).

[0045] FIG. 7 shows a conventional Northern Blot analysis of preferentially expressed genes. Upper half, clones N1-N70 corresponding to genes adjusted down in H-Ras-transformed FE-8 cells were used as hybridization samples. Lower half, clones T1-T74 corresponding to genes up-adjusted in FE-8 cells were used as hybridization samples. Left column, individual blots of whole RNA from normal 208 F cells, right column, from FE-8 RNA. Black arrows show the correct transcript size as described in the literature. White arrows show aberrant transcripts. Control hybridizations were carried out with a GAPDH sample (A to E). Original size of the Northern Filter; 3×1 cm.

[0046] FIG. 8 shows representative examples of the actions of the Ras/Raf/Mek signal transduction path and various Ras isoforms in the target gene transcription.

[0047] a to e) Northern Blot analysis of the mRNA expression in normal 208 F fibroblasts, H-Ras-transformed A cells and FE-8 cells treated with PD98059.

[0048] f to i) Northern Blot analysis of the mRNA expression in normal 208 F cells and in 208F cells transformed with mutated H-Ras, K-Ras and, N-Ras.

[0049] k) MMP-3, representative example of a gene without significant differential expression.

[0050] FIG. 9 shows a characterization of cells transformed with isoforms of the Ras oncogene.

[0051] a) Morphology of normal 208F fibroblasts, H-Ras-transformed FE-8 cells, K-Ras- and N-Ras-transformed 208F cells. Phase contrast, 100×magnification.

[0052] b) Anchor-independent proliferation of cells in cultures on poly-hema-coated surfaces. Ordinate: absorption at 490 nm.

[0053] c) Western Blot analysis of Ras expression.

[0054] FIG. 10 shows representative examples of a differential mRNA expression in stable rat ovarian surface epithelial cells transformed with K-Ras and in conditional H-Ras-transformed fibroblasts. Left: Northern Blot analysis of whole RNA from normal rat ovarian surface epithelial cells (ROSE199) and 2 K-Ras-transformed derivatives (ROSE A2/1 K-Ras and ROSE A2/5 K-Ras). Right: RNA from 208F cells, stable transformed FE-8 cells and conditionally transformed 208F-iHRas-cells before (−IPTG) and after 4 days of a Ras-induction (+IPTG).

[0055] FIG. 11 shows the nucleotide sequences of cDNAs corresponding to the identified differentially expressed transcripts. In addition to the concretely indicated sequences, FIG. 11 also contains, of course, a disclosure relative to the complementary sequences.

[0056] FIG. 12 shows the nucleotide sequences of homologous human cDNAs. FIG. 12 also contains a disclosure relative to the complementary sequences.

[0057] FIG. 13 shows a correlation of nucleotide sequences (rats) shown in FIG. 11 to the homologous human sequences according to FIG. 12.

[0058] SEQ. ID NOS. 1-885; sequences SEQ. ID NOS. 1, 2, 3 . . . 335 correspond to sequences 1, 2, 3 . . . 335 according to FIG. 12. Sequences SEQ. ID NOS. 336, 337, 338 . . . 632 correspond to sequences nos. 1, 2, 3 . . . 297 according to FIG. 11, and sequences SEQ. ID NOS. 633, 634, 635 . . . 885 correspond to sequences T1, T2, T3 . . . T253 according to FIG. 11.

### EXAMPLES

[0059] 1. Methods

[0060] 1.1 Cell Culture and DNA Transfections

[0061] Cells were cultivated in Dullbeco's Modified Eagle's Medium (DMEM) supplemented with 10% fetal calf serum. The transfections were carried out by calcium phosphate precipitation as described in Griegel et al. (Int. J. Canc. 38 (1986), 697-705). To establish N-Ras transformants, 208F cells were co-transfixed with pcDneo and the N-Ras (G12D) oncogene (Souyri et al., Virology 158 (1987), 69-78) and selected in DMEM with 400 μg/ml of G418. The K-Ras (C12V) oncogene was cloned from human colon cancer cell line SW480 and transfixed in 208F cells. 208F-K-Ras cells were isolated from morphologically transformed transfectants. FE-8 cells are G418-resistant H-rus (G12V)-transformed derivatives of 208F (Griegler et al., supra).

[0062] For production of subtracted libraries, cells from an early isolate of the FE-8 cell line were used. 208F cells were kept in culture no longer than 30 days after transfection. K-Ras-transformed rat ovarian surface epithelial cells were isolated with K-Ras (C12 V) after transfection of ROSE199 cells (Adams and Auersperg, Exp. Cell Biol. 53 (1985), 181-188). For the production of 208F-iH-Ras cells, which show an inducible expression of the H-Ras oncogene, 208F cells were co-transfixed with the plasmids pSVlacOras and pHβlacINLSneo (Liu et al., Canc. Res. 52 (1992), 983-989) and selected in standard medium with 400 μ/ml of G418. For the Ras expression, the cells were incubated for four days with 20 mmol of isopropyl-1-thio-β-D-galactoside (IPTG).

[0063] The MEK inhibitor PD98059 (Dudley et al. PNAS USA 92 (1995), 7686-7689) was dissolved in DMSO at a final concentration of 50 mmol. FE-8 cells were treated for 2 days with PD98059 at a final concentration of 50 μmol. The anchor-independent proliferation was determined in a semiquantitive manner in cultures that were grown on microtiter plates coated with poly-2-hydroxyethylmethacrylate (poly-hema; Sigma). 75 μl of a poly-hema-stock solution (5 mg/ml in 95% ethanol) was added into the recesses and allowed to dry for 72 hours at 37° C. Cell suspensions were saturated in coated plates (1000 cells/recess), and the growth was determined after 5 days with use of an XTT assay (Roche, Mannheim, Germany).

[0064] 1.2 Cloning of Differentially Expressed Sequences by Subtractive Suppression Hybridization (SSH)

[0065] Whole RNA was obtained from subconfluent cultures as described by Chomczynski and Sacchi (Anal. Biochem. 162 (1987), 156-159). mRNA was isolated from 1 mg of whole RNA with use of the mRNA separator kit (Clontech, Palo Alto, Calif., USA). cDNA synthesis and subtraction were performed with use of the PCR-Select™ subtraction kit (Clontech, Palo Alto, Calif., USA) according to the manufacturer's instructions with the following modifications: a driver/tester volume ratio of 2:12 was used in the first hybridization. 26 cycles of the primary PCR and 10 cycles of the secondary PCR were performed with use of the Advantage CDNA Polymerase Mix (Clontech). To determine the efficiency of the cDNA subtraction, transcript amounts of the constitutively expressed gene GPADH were compared by RT-PCR in subtracted and unsubtracted populations of 208F RNA or FE-8 RNA. The detection of the GAPDH sequences for both subtractions required 28 PCR cycles with use of subtracted cDNA as matrices, while only 18 cycles were required for amplification of GAPDH from control cDNA. In addition, the amounts of genes for which a differential expression in 208F and FE-8 cells is known were tested by RT-PCR. As expected, H-Ras-specific cDNA was concentrated in subtracted and unsubtracted FE-8 cDNA. The amount of lysyloxidase cDNA was higher in subtracted 208F cDNA than in unsubtracted 208F cDNA and showed a reduction by a small amount in unsubtracted FE-8 cDNA up to a no longer detectable amount in subtracted FE-8 cDNA.

[0066] The subtracted cDNA sequences were purified with use of the QIA Quick PCR purification kit (Quiagen, Valencia, Calif., USA). 10 ng of cDNA were inserted in the vector pCR2.1 (invitrogen, Leeg, The Netherlands) by T/A cloning. Individual transformants with cDNA fragments were isolated from white colonies on X-GaI/IPTG-agar plates. To determine the quality of the library with respect to redundancy and specificity, 35 randomly picked cDNA transformants from each DNA library were isolated and sequenced. The differential expression of the inserted sequences was analyzed in the Nothern Blots with 10 μg of whole RNA from 208F and FE-8 cells.

[0067] 1.3 Sequence Analysis

[0068] Sequencing reactions were performed with the M13 Universal Primer with use of the BigDye sequencing kit (Perkin Elmer) according to the manufacturer's instructions. The sequences were determined in an AB1377 sequencing device. The sequencing of, the cDNA insertions of subtracted libraries was completed when the number of redundant sequences significantly exceeded those of new clones. The clustering was carried out with use of GAP4 software (Staden Package). Sequence homology studies were carried out from the data bases GenBank (nr) and Expressed Sequence Tag (dbest) with use of the BLASTN program in NCBI (http:\\www.ncbi.nlm.nih.gov\BLAST).

[0069] 1.4 Hybridization Analysis

[0070] Non-redundant plasmid-DNA samples of all identified fragments were transferred onto 96-hole-microtiter plates. With use of PCR-Select™ adaptor-specific primers, a PCR amplification was performed with 30 cycles (30 sec 94° C., 30 sec 68° C., 90 sec 72° C.). The average size of the inserted fragments was 800 bp. The PCR-amplified insertions were plotted on 2 25×12 cm Nytran nylon membranes respectively (Schleicher and Schuell, Dassel, Germany). A Reverse Northern Analysis was performed as described by Stein et al. (Nucleic Acids Res. 25 (1997), 2598-2602), except that the following hybridization conditions were used: Pre-hybridization of the membranes was carried out with 5×Denhardt's reagent, 5×SSC, 50 mmol of phosphate buffer, 0.5% SDS, 100 ng/ml of tRNA at 65° C. for 3 hours. The hybridization was carried out in the same buffer without Denhardt's reagent and 50 mmol of phosphate buffer at 65° C. for 16 hours.

[0071] For the conventional Northern Blot analysis, 10 μg of whole RNA was electrophoretically separated in 1% agarose gel with formaldehyde and blotted in 20×SSC on Protran nitrocellulose membranes (Schleicher and Schuell, Dassel, Germany). The cDNA fragments were labeled with ³²P-dCTP with use of the Ready Prime System (Amersham, Brunswick). The hybridization was carried out in ExpressHyb hybridization buffer (Clontech) at 68° C. overnight. The membranes were washed twice in 2×SSC, 0.1% SDS at 42° C. for 20 minutes and 2×0.1 SSC, and 0.1% SDS at 66° C. for 30 minutes and analyzed by autoradiography.

[0072] 2. Results 2.1 Properties of the Cells Used for Identifying Ras-transformation Targets

[0073] The preneoplastic cell line 208F and its malignant Ras-transformed derivative FE-8 (FIG. 5a) show an almost diploid karyotype without significant numeric or structural chromosomal aberrations (FIG. 5b). While 208F cells do not show any spontaneous transformation, FE-8 cells are anchor-independent (FIG. 5c) and show a strongly malignant action with subcutaneous injection in athymic hairless mice or newborn rats (Griegel et al. (1986), supra; Sers et al. (J. Cell Biol. 136 (1997), 935-944). The 208F/FE-8 cell system thus is suitable for the preparation of a population of transcriptionally altered genes, which are caused by a permanent Ras-signalling and by changes in the general gene adjustment.

[0074] 2.2 Isolation of Sequences Expressed Differentially in Transition From the Normal State to the Transformed State

[0075] cDNA clones, which preferentially represent mRNAs that are expressed in normal 208F rat cells or in transformed FE-8 cells, were obtained from two subtracted cDNA libraries. For isolation from sequences (N-clones) that are adjusted down in the transition from normal to transformed state, tester cDNA from normal 208F fibroblasts and driver cDNA from transformed FE-8 cells (forward-subtraction) were used. To obtain sequences (T-clones) up-adjusted during the neoplastic transformation, FE-8 cDNA was used as a tester and 208F cDNA was used as a driver (backward-subtraction). The nucleotide sequences of 1357 subtracted cDNA clones were determined after T/A cloning and bacterial transformation. In this case, 823 individual sequences were identified (FIGS. 1, 11). To verify the differential expression by independent methods, subtracted cDNA sequences were amplified by PCR with use of Nested Adapter Primers. The PCR products were separated by gel-electrophoresis and transferred onto hybridization membranes. In each case, two membranes were hybridized with radiolabeled samples from normal 208F cells or transformed FE-8 cells (Reverse Northern Analysis, FIG. 6). In addition, whole RNA from 208F and FE-8 cells with Standard Northern Blots was analyzed with use of individual cDNA fragments as samples. By conventional Northern Analysis, the differential expression of 48 to 50 randomly selected CDNA fragments (96%) on Reverse Northern Blots was verified. In addition, 193 known gene fragments, which yielded no clear signals or even no hybridization signals on the Reverse Northern Membranes, were analyzed in a conventional way. The results of all Standard Northern Blot analyses with reference to differential expression of Ras-transformation targets are shown in FIG. 7. Expressed sequence tags and new sequences were not further analyzed, when the sensitivity of the Reverse Northern Blot was not sufficient to verify clearly a differential expression. The list of all differential genes classified according to selected properties of their products is shown in FIG. 2. The methods used for detection of expression differences between normal and transformed makes it possible to isolate strongly and poorly expressed genes. Based on the compensating step contained in the SSH process, an identification of strongly expressed transcripts (e.g., coding for proteins of the cytoskeleton) and mRNAs with a low copy number (e.g., coding for transcription factors) was made possible. The cDNA fragments identified in this study represent a significant fragment of the differentially expressed genes in the two cell lines.

[0076] 2.3 Transcriptional Basis for Abnormal Growth, Invasive and Metastatic Properties in Ras-transformed Cells

[0077] A number of genes, of which it was already known that they are present in Ras-transformed cells in altered mRNA amounts, was obtained from FE-8 cells. The potential Ras targets, which have a stimulated or de novo expression, comprise the genes coding the metastasis-associated glycoprotein CD44, the transcription factor Fra-1, the alpha-chemokin Mob-1, the metalloproteinases MMP-1 and MMP-3 and the regulatory light chain of myosin. The known down-adjusted Ras targets contain the genes for α-actin, collagen α-1, entactin/nidogen, fibronectin, TGFβ-stimulated sequence TSC36, lysyloxidase, smooth muscle-myosin-light chain (MLC)-2 and NAD-dehydrogenase.

[0078] The transcription pattern of Ras-transformed cells showed a single correlation with agressive tumor behavior. Thus, for example, the expression of the laminin receptor, MMP-1 (collagenase), MMP-3 (stromelysin-1), MMP-10 (stromelysin-2) and CD44 glycoprotein, whose importance for metastasizing is known, was stimulated in FE-8 cells. At the same time, a large number of antiproliferative, anti-invasive or antiangiogenic genes was repressed in FE-8 cells. These genes code for syndecan-2, tissue inhibitors of metalloproteases (TIMP)-2, lysyloxidase (rrg-1), thrombospondin-1, protein kinase A II, the myristoylated, alanine-rich C-kinase substrate (MARCKS), and the growth arrest-specific protein GAS-1.

[0079] A linkage between the Ras-oncogene-mediated signalling and the pharmaceutical agent resistance was also found based on the upward-adjustment of genes in FE-8 cells, which are involved in transport and processing of cytotoxic pharmaceutical agents, including the multispecific anion transporter MOAT-B, the exopeptidase bleomycin hydrolase and the aldehyde reductase. In addition, various genes were identified that are involved in signal transduction processes for the adjustment of mitogenic activity and the survival of cells as well as of genes that influence the reorganizing of the cytoskeleton, the reaction to stress, oxidative phosphorylation, glycolytic energy production and fatty acid oxidation (FIG. 2).

[0080] 3.4 Sensitivity of Ras-mediated Transcriptional Changes to the Inhibition of the Raf/Mek-Signal Transduction Path

[0081] It is known that a number of signal effector proteins interact with the main effector domains of Ras. In addition to the Raf-kinase, the main effector of Ras, Raf-independent mechanisms are also involved in the Ras-mediated transformation (in the overview, see Khosravi et al., Adv. Cancer. Res. 72 (1998), 57-107). It was now examined to what extent the Raf-signal transduction cascade downstream from the Ras influences the gene transcription and the transformed phenotype in FE-8 cells.

[0082] In the treatment with the specific Mek-inhibitor PD98059, FE-8 cells showed a more normal morphology like 208 F-cells (FIG. 5a) and a significantly reduced ability for anchor-independent proliferation (FIG. 5c) despite uniform amounts of p21 Ras (FIG. 5d). The Raf/Mek-signal cascade was blocked, as shown by reduced amounts of phospho-p44/42-MAPK amounts, which could not be distinguished from the non-transformed 208 F-cells (FIG. 5e). cDNA arrays comprising all differentially expressed sequences, which were detectable by Reverse Northern analysis (FIG. 2), were hybridized with radiolabeled samples of RNA from untreated and inhibitor-treated FE-8 cells. In addition, a total of 77 preferentially expressed known genes, which were not detectable either in DNA arrays in a positive manner or in arrays, were studied by conventional Northern Blot analysis (FIGS. 8a to e). In this case, 61 known transcripts were identified, which were sensitive relative to a MAP-kinase inhibition (FIG. 3, FIGS. 8a-e). The H-Ras-mediated-downward-adjustment was reversed for 36 transcription targets, while the upward-adjustment of 25 targets was blocked. The mRNA amounts of 116 genes or expressed sequences was not influenced in FE-8 cells treated with inhibitors.

[0083] 3.5 Ras Isoform-specific Gene Expression Profiles

[0084] The oncogenes H-Ras, K-Ras, and N-Ras and their products resemble one another in structure and function. The Ras proteins differ considerably, however, in the amino acid composition of the C-terminus, the expression pattern and their post-translational modification (for an overview, see Malumbres and Pellicer, Frontiers in Biosciences 3 (1998), 887-912). In addition, individual isoforms are preferably mutated in different types of cancer (Bos, Canc. Res. 49 (1998), 4682-4689).

[0085] To find out in what way the transcription of the H-Ras target genes influences the two other Ras isoforms, 208F rat cell lines were produced, which express the activated K-Ras or N-Ras gene. These cell lines showed similar properties in the neoplastic transformation such as FE-8 cells (FIG. 9). Radiolabeled cDNA samples of 208F cells transformed by mutated K-Ras or N-Ras were hybridized with the CDNA arrays that contain the H-Ras transformation-sensitive sequences (n=233). The results of a Reverse Northern Analysis were verified by conventional Northern Blot. In addition, 30 poorly expressed genes were analyzed with Northern Blots (FIGS. 8f to i). About 90% of all sequences that are sensitive relative to an H-Ras transformation show a very similar expression pattern in cells, which had been transformed by the two mutated Ras isoforms. The amounts of 26 cDNA fragments showed clear differences, however (FIG. 4, FIGS. 8f-e). More specific H-Ras targets than K-Ras or N-Ras targets were found.

[0086] The high degree of similarity of target genes in three independent transfixed cell lines, which express various Ras isoforms, shows that the transcriptional changes can be reproduced to a large extent and are not based on random differences between the cell lines. To study cells of a different tissue type, a randomly selected subclass of target genes was analyzed by s-transformed rat ovarian surface epithelial cells (FIG. 10, left). The transcriptional changes in FE-8 and K-Ras-transformed ROSE cells were very similar. In addition, most of the transcriptional changes in 208F cells that were specific to the FE-8 cells and that had been transformed with an IPTG-inducible H-Ras gene were reproducible (FIG. 10, right).

1. Nucleic acid, characterized in that it shows a differential expression in tumor cells and normal cells, comprising
(a) one of the nucleic acid sequences shown in FIG. 11,
(b) partial sequences thereof with a length of at least 50, preferably at least 100, and especially preferably at least 200 nucleotides,
(c) a sequence that hybridizes with a sequence that consists of (a) and/or (b) under stringent conditions, and/or
(d) a sequence that is complementary to a sequence that consists of (a), (b) and/or (c).

2. Nucleic acid according to claim 1, wherein
the tumor cells are selected from rat fibroblasts that are transformed with H-Ras, N-Ras and K-Ras.

3. Nucleic acid according to claim 1 or 2, wherein
the normal cells are selected from 208F rat fibroblasts.

4. Nucleic acid according to one of claims 1 to 3, wherein
it shows an enhanced expression in a Ras-transformed cell line in comparison to a non-transformed cell line or is expressed de novo in a Ras-transformed cell line.

5. Nucleic acid according to one of claims 1 to 4, wherein
its expression in Ras-transformed cells is adjusted down.

6. Nucleic acid according to claim 4, wherein
it comprises one of sequences N1-N297 according to FIG. 11 or a sequence that thus hybridizes under stringent conditions.

7. Nucleic acid according to claim 6, selected from the sequences that are not yet described as mRNA in rats:
N100, N103, N104, N105, N106, N107, N109, N110, N111, N112, N113, N114, N115, N116, N117, N118, N12, N120, N121, N122, N124, N125, N126, N127, N128, N129, N13, N130, N131, N133, N134, N135, N136, N137, N138, N139, N14, N140, N141, N143, N144, N145, N146, N147, N148, N149, N150, N151, N152, N153, N154, N156, N157, N158, N16, N160, N161, N162, N163, N164, N165, N166, N167, N168, N169, N17, N170, N171, N172, N173, N174, N175, N176, N177, N178, N18, N180, N181, N182, N183, N184, N185, N186, N187, N188, N189, N19, N190, N191, N192, N193, N194, N195, N196, N197, N198, N199, N2, N20, N201, N202, N203, N204, N205, N206, N207, N208, N209, N21, N210, N211, N212, N213, N214, N215, N216, N217, N218, N219, N22, N220, N221, N222, N223, N224, N225, N225, N227, N228, N229, N23, N230, N231, N232, N234, N236, N237, N238, N239, N240, N241, N242, N244, N246, N247, N248, N249, N25, N250, N251, N252, N253, N254, N255, N256, N257, N258, N259, N260, N261, N262, N263, N264, N265, N266, N267, N268, N269, N270, N271, N272, N273, N274, N275, N276, N277, N278, N278, N279, N28, N280, N281, N282, N283, N284, N285, N286, N287, N288, N289, N290, N291, N292, N293, N294, N295, N296, N297, N30, N32, N35, N38, N4, N44, N46, N51, N55, N56, N57, N59, N60, N62, N64, N65, N68, N69, N71, n73, N74, N75, N76, N77, N78, N79, N80, N81, N82, N84, N86, N87, N88, N89, N90, N91, N92, N93, N94, N96, N97, N98, N99

8. Nucleic acid according to claim 6, selected from sequences for which homologous sequences are described in model organisms, such as mice, chickens, Xenopus, C. elegans, Drosophila, but which are not known in humans:
N103, N105, N112, N113, N115, N116, N121, N127, N128, N13, N14, N151, N16, N163, N164, N17, N182, N184, N185, N189, N19, N199, N2, N20, N212, N225, N241, N249, N252, N257, N264, N269, N289, N29, N296, N30, N38, N4, N56, N57; N59, N60, N64, N65, N68, N69, N74, N9

9. Nucleic acid according to claim 5, wherein
it comprises one of sequences T1-T235 according to FIG. 11 or a sequence that thus hybridizes under stringent conditions.

10. Nucleic acid according to claim 9 selected from the sequences that are not yet described as mRNA in rats:
T1, T100, T101, T102, T103, T104, T105, T106, T107, T108, T109, T110, T111, T112, T113, T114, T115, T116, T118, T191, T12, T120, T121, T122, T123, T124, T125, T126, T127, T128, T129, T130, T131, T134, T135, T136, T137, T14, T140, T141,T142, T144, T145, T146, T147, T148, T149, T150, T151, T153, T54, T155, T156, T157, T158, T159, T160, T163, T164, T165, T168, T169, T17, T170, T171, T172, T173, T174, T175, T177, T178, T179, T18, T180, T181, T182, T183, T184, T185, T186, T187, T188, T189, T19, T190, T191, T192, T194, T195, T196, T197, T198, T199, T2, T20, T200, T201, T202, T203, T204, T205, T206, T207, T208, T209, T210, T211, T212, T213, T214, T215, T216, T217,T218, T219, T220, T221, T222, T223, T224, T225, T226, T227, T228, T229, T230, T23, T232, T233, T234, T235, T236, T237, T238, T239, T24, T241, T242, T243, T244, T245, T247, T248, T249, T25, T250, T251, T252, T253, T27, T28, T29, T3, T31, T34, T35, T36, T37, T39, T4, T40, T42, T46, T48, T49, T50, T52, T58, T60, T61, T62, T63, T65, T66, T68, T69, T7, T70, T73, T76, T77, T78, T79, T79, T8, T81, T82, T83, T84, T85, T86, T87, T88, T9, T90, T91, T92, T94, T95, T96, T97, T99

11. Nucleic acid according to claim 9, selected from sequences for which homologous sequences are described in model organisms such as mice, chickens, Xenopus, C. elegans, drosophila, but which are not known in humans:
T1, T 181, T121, T122, T137, T142, T18, T2, T20, T222, T232, T238, T25, T3, T31, T32, T35, T37, T49, T50, T59, T60, T63, T65, T69, T7, T73, T8,

12. Nucleic acid according to one of claims 1 to 11, wherein
it has a homology to human sequences, especially human ESTs or EST clusters.

13. Nucleic acid according to claim 12, selected from
N1, N10, N101, N102, N103, N104, N108, N109, N11, N112, N116, N12, N121, N122, N125, N126, N128, N129, N13, N131, N132, N134, N136, N137, N14, N142, N144, N148, N149, N151, N152, N154, N156, N158, N159, N160, N163, N165, N17, N175, N18, N180, N181, N182, N183, N186, N187, N188, N189, N192, N196, N198, N199, N20, N202, N204, N205, N207, N209, N21, N212, N213, N215, N218, N22, N228, N234, N235, N238, N242, N243, N248, N249, N250, N252, N253, N255, N256, N257, N26, N260, N261, N263, N264, N266, N267, N270, N271, N275, N28, N280, N283, N289, N29, N294, N3, N30, n31, N32, N34, N35, N36, N38, N39, N4, N40, N42, N43, N44, N45, N46, N48, N49, N5, N50, N51, N55, N58, N59, N61, N62, N65, N7, N70, N71, N74, N75, N77, N78, N79, N80, N81, N82, N85, N89, N92, T10, T100, T103, T105, T109, T11, T111, T116, T117, T118, T119, T120, T121, T124, T125, T129, T132, T133, T137, T138, N139, T14, T141, T143, T144, T146, T147, T148, T15, T153, T156, T159, T16, T160, T162, T163, T166, T17, T170, T172, T174, T175, T176, T182, T183, T185, T186, T188, T189, T19, T191, T192, 193, T196, T2, T20, T202, T204, T205, T208, T21, T211, T212, T215, T216, T217, T219, T222, T223, T224, T225, T226, T227, T230, T232, T235, T237, T238, T239, T240, T243, T244, T245, T25, T250, T251, T253, T27, T3, T31, T34, T35, T36, T37, T38, T40, T42, T43, T44, T45, T47, T48, T49, T50, T54, T58, T59, T6, T60, T61, T62, T64, T66, T67, T68, T69, T72, T73, T74, T75, T76, T80, T82, T86, T88, T89, T9, T94, T96, T98,

14. Nucleic acid according to claim 13, wherein
it represents a human gene, a human cDNA or a partial sequence thereof and wherein the corresponding rat-homologous gene shows a differential expression in tumor cells and normal cells.

15. Nucleic acid according to claim 14, wherein
it comprises one of the sequences shown in FIG. 12.

16. Nucleic acid according to one of claims 1 to 15, wherein
it is arranged as an oligonucleotide or as cDNA on an array.

17. Use of a nucleic acid according to one of claims 1 to 16 or a coded polypeptide thereof as a target for diagnostic or therapeutic purposes.

18. Use according to claim 17 for the production of an agent for tumor diagnosis or tumor therapy.

19. Use according to claim 17 or 18, wherein
the expression of nucleic acid is modulated.

20. Use according to claim 19, wherein
the modulation comprises a gene-therapy treatment of the nucleic acid.

21. Use according to claim 19, wherein
the modulation comprises an administration of antisense-RNA or ribozymes.

22. Use according to claim 17 or 18, wherein
the amount and/or localization of the polypeptide that is coded by the nucleic acid is modulated.

23. Use according to claim 22, wherein
the modulation comprises an administration of the polypeptide or an activator thereof.

24. Use according to claim 22, wherein
the modulation comprises an administration of antibodies directed against the polypeptide or inhibitors of the polypeptide.

25. Process for testing the influence of active substances on the gene expression, wherein
an active substance is added to a cell line, RNA is isolated from the cell line, the RNA is labeled, then hybridized on an array, and then the gene expression profile of the cell line is obtained.

26. Process according to claim 25, wherein
the gene expression profile of cell line (a) that is treated with the active substance is compared to the gene expression profile of a cell line that is not treated with the active substance and/or (b) to the gene expression profile of a cell line that is treated with the active substance but is different.

The application's sequence listing, which the Patent Office published only in electronic form, follows.

SEQUENCE LISTING (885 sequences)

SEQ ID NO: 1 - DNA, 459 bp, Homo sapiens
  modified_base (1): a, t, c, g, other or unknown
  modified_base (346): a, t, c, g, other or unknown
  modified_base (396): a, t, c, g, other or unknown
  modified_base (421): a, t, c, g, other or unknown
  modified_base (431): a, t, c, g, other or unknown
naagcccttcatcgatttatagagcttttcagagtgatggtttctcgagcagaaattgacatgttggatatccgggcacacttcaagagactctatggaaagtctctgtactcgttcatcaagggtgacacatctggagactacaggaaagtactgcttgttctctgtggaggagatgattaaaataaaaatcccagaaggacaggaggattctcaacactttgaatttttttaacttcatttttctacactgctattatcattatctcagaatgcttatttccaattaaaacgcctacagctgcctcctaggaatatagactgtctgtattattattcacctatnattaggtccattatggatgctttaaagctgtacttggcatttccaaagcntataaggttataatgggaggttttnaaagtagganttaaatatgtattccctgttttttaaaa

SEQ ID NO: 2 - DNA, 352 bp, Homo sapiens
catggcatgcagaggatctacaaaatgggttcaccaggcctgtctacaacgctgggtggatgaaaagcaaacaggaaacagtacagccagagtggcatgtcctcagtgcaatgctgaatacctaatagtttttccaaaattgggtccagtggtttacgtcttggatcttgcagatagactgatctcaaaagcctgtccatttgctgcagcaggaataatggtcggctctatctattggacagctgtgacttatggagcagtgacagtgatgcaggttgtaggtcataaagaaggtctggatgttatggagagagctgatcctttattccttttaatttgggacttcctacta

SEQ ID NO: 3 - DNA, 360 bp, Homo sapiens
  modified_base (335): a, t, c, g, other or unknown
  modified_base (353): a, t, c, g, other or unknown
ggcacgaggcatagggctcggcgtggtttcacaggtggtttcttgggcaagatgggcccaccttcaagtattctgggatcaagttcacgtgctttgaatttgtattgttgcaatttctcgagctcctcagcctccagctctgctgtacttttgcaggtcacagcccgtgcacggtgtttggtttgcagtacaggagtctgtgggtctctgcaaatcttggtcacagaagatttggagggtaacaggttaatatcatccttcttggctcctcaaatgatatctgttaggggttcgtttatggaagtcttcaacttgctgtgcaaggtgggcacatnatgtagaaactgtttcancaaatgt

SEQ ID NO: 4 - DNA, 433 bp, Homo sapiens
  modified_base (282): a, t, c, g, other or unknown
  modified_base (373): a, t, c, g, other or unknown
  modified_base (410): a, t, c, g, other or unknown
  modified_base (419): a, t, c, g, other or unknown
gactccttcacgtcaggctcaggttccatgggaggacgaagcagtggacgcattgtgggctttagggacagatgagttttccagatagtgtcagcttatttgaagattaattttctttgttaacttaaaataactattttaacccttgagtggcttctttttaaaccaaaaaccgtctttctttgcttttttatcacagcagaatcaggatctctttctcattcaaggggggaaccaccccagggtcagcgctgcgcctgctgtggccgccgcgagccacgncctctgggattcttttggtaccgtcactcttggcttgtgccttccacaacttctcggttgcagatccctatggggggaagcttgcctcaangttctctggaacttggtcagaagcaagcgcctgggtngggtgtttncctggggccaattt

SEQ ID NO: 5 - DNA, 603 bp, Homo sapiens
  modified_base (21): a, t, c, g, other or unknown
  modified_base (339): a, t, c, g, other or unknown
  modified_base (464): a, t, c, g, other or unknown
  modified_base (505): a, t, c, g, other or unknown
  modified_base (514): a, t, c, g, other or unknown
  modified_base (519): a, t, c, g, other or unknown
  modified_base (528): a, t, c, g, other or unknown
  modified_base (560): a, t, c, g, other or unknown
  modified_base (584): a, t, c, g, other or unknown
aggacgacctccacttcatanaaaacgagtagaagatgagagtctggataacacatggctaaacaggactgacaccatgattcagactcctggccccctgccagcaccacaactcacatccactgtactgcgggagaacagtcggcccatgggagaccagattcaagaacctgagtctgaacatggttctgaaccagactttttacacaatcctcagatgcagatctcttggttaggccagccgaagttagaagacttaaatcggaaggacagaacaggaatgaactacatgaaagtgagaactggagtgaggcatgctgttcggggtctaatggaggnagatgctgagcccatctttgaagatgtgatgatgtcatcccgaagccagttagaagatatgaatggaagaatttggaggacaccatgggttattgatctgcctcccatcaagaaatcggcgagangagagctgagctaaggcccagacttcctttgactctgccanttatccatnggagntggattcanggatttgggaatgccctatggttcctgaagtnctgggaggaaattttccaaacctnggacccctattaattttgg

SEQ ID NO: 6 - DNA, 573 bp, Homo sapiens
  modified_base (6): a, t, c, g, other or unknown
  modified_base (87): a, t, c, g, other or unknown
  modified_base (449): a, t, c, g, other or unknown
  modified_base (557): a, t, c, g, other or unknown
gcgacncgccgagcctcgtcagcctgcgcagcccctcacaggaggcccagcccgagtgcagtccagaagcccccccagcggaggcgncagagtaaaagagcaagcttttgtgagataatcgaagaacttttctcccccgtttgtttgttggagtggtgccaggtactggttttggagaacttgtctacaaccagggattgattttaaagatgtctttttttattttacttttttttaagcaccaaattttgttgttttttttttttctcccctccccacagatcccatctcaaatcattctgttaaccaccattccaacaggtcgaggagagcttaaacaccttcttcctctgccttgtttctcttttattttttattttttcgcatcagtattaatgttttttgcatactttgcatctttattcaaaagtgtaaactttctttggtcnaatctatgggacatggcccatatatggaaggagatggggtggggtcaaaaaggggatatcaaatgaaagtggatagggggccacaatgggggaaattgaagtgggggnataacatggccaaaat

SEQ ID NO: 7 - DNA, 487 bp, Homo sapiens
  modified_base (479): a, t, c, g, other or unknown
taagggtttctctactatgtccacttggtaaaatgcggctgacaattccgtgtcgggcccttacatgttctcatctacaatgttttgacgcaactctttacattcagatgaatgagaaaaaaccaacctgggtttgtcctgtctgtgataagaaggctccatatgaacaccttattattgatggcttgtttatggaaatcctaaagtactgtacagactgtgatgaaatacaatttaaggaggatggcacttgggcaccgatgagatcaaaaaaggaagtacaggaagtttctgcctcttacaatggagtcgatggatgcttgagctccacattggagcatcaggtagcgtctcaccaccagtcctcaaataaaaacaagaaagtagaagtgattgacctaaccatagacagttcatctgatgaagaggaagaagagccatctgccaagaggacctgtccttccctatctcccacatcnaccactag

SEQ ID NO: 8 - DNA, 168 bp, Homo sapiens
  modified_base (147): a, t, c, g, other or unknown
caaatttgtgttgtatatattcgtattccatgtgttagatggaagcatttcctatccagtgtgaataaaaagaacagttgtagtaaattattataaagccgatgatatttcatggcaggttattctaccaagctgtgcttgttggtnttttcccatgactgtaatgct

SEQ ID NO: 9 - DNA, 219 bp, Homo sapiens
agagagtggttcaaagtagaagatgctatcaaagttctccagtgtcataaacctgtacatgcagagtatctggaaaagctaaagctgggttgttccccagccaatggaaattctacagtcccttcccttccggataataatgccttgtttgtaaccgctgcacagacctctgggttgccatctagtgtaagatagagagaactgggtaggcctctccca

SEQ ID NO: 10 - DNA, 227 bp, Homo sapiens
  modified_base (63): a, t, c, g, other or unknown
  modified_base (198): a, t, c, g, other or unknown
  modified_base (211): a, t, c, g, other or unknown
  modified_base (224): a, t, c, g, other or unknown
tttaagtgtgttgcctgtgagtgtgacctcggaggctcttcctcaggagctgaagtcaggatnagaaaccaccaactgtactgcaacgactgctatctcagattcaaatctggacggccaaccgccatgtgatgtaagcctccatacgaaagcactgttgcagatagaagaagaggtggttgctgctcatgtagatcnataaatatgtgtngtatgtctttttngct

SEQ ID NO: 11 - DNA, 621 bp, Homo sapiens
  modified_base (22): a, t, c, g, other or unknown
  modified_base (52): a, t, c, g, other or unknown
  modified_base (343): a, t, c, g, other or unknown
  modified_base (503): a, t, c, g, other or unknown
  modified_base (527): a, t, c, g, other or unknown
  modified_base (532): a, t, c, g, other or unknown
  modified_base (580): a, t, c, g, other or unknown
cagggaaaaaatatgttcgatncccctggtaactgtctccttatctgcaaantgacatcccaacggattgcatgccctcggcctactgcaaaagaatcatcaacctggggcctgtgcatcccggacctctgagtccagaaccccaacccatgggtgtcagggttatctgtggacattgcaagaatacttttctgtggacagagttcacagaccgcactttggcacgttgtcctcactgcaggaaagtgtcatctattgggcgcagatacccacgtaagagatgtatctgctgcttcttgcttggcttgcttttggcagtcactgccactggccttgcctttgnacatggaagcatgcacggcgatatggaggcatctatgcagcctgggcatttgtcatcctgttggctgtgctgtgtttgggccgggctctttaattgggcctgtatgaaggtccagccaacctggtccagaaattctcctgaagcctgatgacccacagancggtgccttggcccctccctggtngggancagttacactacgaaggaagctggggtagttaaagggtccggggcttntaagaagaagccaagcaacttgcttcctttccctggggaaa

SEQ ID NO: 12 - DNA, 409 bp, Homo sapiens
  modified_base (302): a, t, c, g, other or unknown
  modified_base (374): a, t, c, g, other or unknown
cagacgctgcccaaggctttgtgggctgcgcactcagctccaccatccagcgcttctacaagaacgagggaggtacatggtcagtggagaaggtgatccaggtgccccccaagaaagtgaagggctggctgctgccgaaatgccaggcctgatcaccgacatcctgctctccctggacgaccgcttcctctacttcagcaactggctgcatggggacctgaggcagtatgacatctctgacccacagagaccccgcctcacaggacagctcttcctcggaggcagcattgttaagggaggcnctgtgcaagtgctgaggacgaggaactaaagtcccagccagagcccctagtggtcaagggaaaacgggtggntggaggcctcagatgatccagtcagcctggatggg

SEQ ID NO: 13 - DNA, 439 bp, Homo sapiens
ttcgggtaaattgtaatttttttattggaaaacaaatatacaacttggaatggattttgaggcaaattgtgccataagcagattttaagtggctaaacaaagtttaaaaagcaagtaacaataaaagaaaatgtttctggtacaggaccagcagtacaaaaaaatagtgtacgagtacctggataatacacccgttttgcaatagtgcaacttttaagtacatattgttgactgtccatagtccacgcagagttacaactccacacttcaacaacaacatgctgacagttcctaaagaaaactactttaaaaaaggcataacccagatgttccctcatttgaccaactccatctaagtttagatgtgcagaagggcttagatatatccagagtaagccacatgcaacatggttacttgatcaattttctaaaataaggt

SEQ ID NO: 14 - DNA, 486 bp, Homo sapiens
  modified_base (342): a, t, c, g, other or unknown
  modified_base (486): a, t, c, g, other or unknown
gctaggaagatagttgttacatactgaagtaggttattaaataaagtaatgaaatatctttgaacatatatataaataggacaggcttatattctaactagtttgcggtgttttcagctaactctatcacacctaaccatctgtgtaagacttgatgcattttatatcatttttaggctgggctaggaaacaacaaaatcacagatatcgaaaatgggagtcttgctaacataccacgtgtgagagaaatacatttggaaaacaataaactaaaaaaaatcccttcaggattaccagagttgaaatacctccaggtaaaacattctacttgtgttcagtagntattgggtatttttccttcaggtttttaataacacactttaggcacacctcaagcaaaggaccaagtaaggcagcaaggggtggattcaaacataatgactctccaggttgcatgaggtgttttaagaagtaggagagctttan

SEQ ID NO: 15 - DNA, 601 bp, Homo sapiens
  modified_base (474): a, t, c, g, other or unknown
  modified_base (482): a, t, c, g, other or unknown
  modified_base (514): a, t, c, g, other or unknown
  modified_base (588): a, t, c, g, other or unknown
cgacaactgtgctgacaacccatgttcttgcagccagtctcactgttgtacacgatggtcagccatgggtgtcatgtccctctttttgccttgtttatggtgttaccttccagccaagggttgccttaaattgtgccaggggtgttatgaccgggttaacaggcctggttgccgctgtaaaaactcaaacacagtttgctgcaaagttcccactgtcccccctaggaactttgaaaaaccaacatagcatcattaatcaggaatattacagtaatgaggattttttctgtctttttttaatacacatatgcaaccaactaaacagttataatcttggcactgttaatagaaagttgggatagtctttgctgtttgcggtgaaatgctttttgtccatgtgccgttttaactggatatgcttgttagaactccagctaatggagctcaaagtatgagatacagaacttgggtganccatgtantgcataagctaaagcaacacagacactcctangcaaagtttttggttggtgaatagtaccttgcaaaacttgtaaattagcagatgacttttttccatgggtttcnccagagagaatgt

SEQ ID NO: 16 - DNA, 511 bp, Homo sapiens
  modified_base (274): a, t, c, g, other or unknown
  modified_base (419): a, t, c, g, other or unknown
  modified_base (475): a, t, c, g, other or unknown
  modified_base (488): a, t, c, g, other or unknown
  modified_base (507): a, t, c, g, other or unknown
agaggatcgccaaggccgtgaacgagaagtcctgcaactgcctcctgctcaaagtcaaccagattggctccgtgaccgagtctcttcaggcgtgcaagctggcccaggccaatggttggggcgtcatggtgtctcatcgttcgggggagactgaagataccttcatcgctgacctggttgtggggctgtgcactgggcagatcaagactggtgccccttgccgatctgagcgcttggccaagtacaaccagctcctcagaattgaagaggagcngggcagcaaggctaagtttgccggcagaacttcagaaaccccttggccaagtaagctgtgggcaggcaagccttcggtcacctgttggctacacagacccctcccctcgtgtcagtcaggcagtcgaggccccgaccaacacttncaggggtcctgctagttagcgcccaccgccgttgagttcgtaccgttcttagaatntacagaagccaantccttggagcctgttgcantcta

SEQ ID NO: 17 - DNA, 338 bp, Homo sapiens
  modified_base (301): a, t, c, g, other or unknown
  modified_base (332): a, t, c, g, other or unknown
caatgcttgaagtataaaaagctgagagtgttctcgggcagggagtctccagaaccaggagaagaagaatttggacgctggatgtttcatactactcagatgataaaggcgtggcaggtgcagatgtagagaagagaaggcgattgctagagagccttcgaggcccagcacttgatgttattccgtgtcctcaagataaacaatcctttaattactgtccgatgaatgtctgcaggctcttgaggaggtatttggggttacagataatcctagggagttgcaggtcaaatatctaaccacnttaccagaaggatgaggaaaagttgtcggcntatgtc

SEQ ID NO: 18 - DNA, 245 bp, Homo sapiens
  modified_base (41): a, t, c, g, other or unknown
  modified_base (56): a, t, c, g, other or unknown
  modified_base (232): a, t, c, g, other or unknown
  modified_base (240): a, t, c, g, other or unknown
aggaaattaacattttgatacccatgcattggttcaggacnttggaaactcatggntttgacaaaacacaagcagaaacaattgtatcagcgttaactgctttatcaaatgtcagcctggatactatctataaagagatggtcactcaagctcaacaggaaataacagtacaacagctaatggctcatttggatgctatcaggaaagacatggtcatcctagagaaaagtgnatttgcanatctg

SEQ ID NO: 19 - DNA, 304 bp, Homo sapiens
  modified_base (155): a, t, c, g, other or unknown
  modified_base (161)..(162): a, t, c, g, other or unknown
  modified_base (164): a, t, c, g, other or unknown
  modified_base (249): a, t, c, g, other or unknown
gatcaaacaaagtctgatagtctatgcaagtaaccagccatgtatttgtaacaacttctcccacagtggcttccacttcacaccccagcagaggaaccacagcataatccgcaacagttctgctcagaagggacatgattttcccagcattttcntttaannangtttgcgatgttagattcattttcattactaaaacccaaaacaaggaaactcttttggctaaataagccttcttcagtaattgtngaaacatcaggggacacaatgacttgacagaagactgggttttccttctttggca

SEQ ID NO: 20 - DNA, 1558 bp, Homo sapiens
  modified_base (16): a, t, c, g, other or unknown
  modified_base (427): a, t, c, g, other or unknown
  modified_base (492): a, t, c, g, other or unknown
  modified_base (551): a, t, c, g, other or unknown
  modified_base (728): a, t, c, g, other or unknown
  modified_base (744): a, t, c, g, other or unknown
  modified_base (979): a, t, c, g, other or unknown
  modified_base (1146): a, t, c, g, other or unknown
  modified_base (1243): a, t, c, g, other or unknown
  modified_base (1343): a, t, c, g, other or unknown
  modified_base (1346): a, t, c, g, other or unknown
  modified_base (1352): a, t, c, g, other or unknown
  modified_base (1423): a, t, c, g, other or unknown
  modified_base (1535): a, t, c, g, other or unknown
aggaggccgcggcggngcagggcggcgactgcctgcctgcctgggttgcggaagtgatagccgccgaccgagcctgctgctttcttgctactgcttcggcttcccgcctacttcccccggacggtgaaggcggcccagctgtggatggtcagatagcccttgtctcccgccgccaatctctggcccctagcagcacggagcagacggcggcagcagcagcagcaggcgaggaggaagatggcgggacggctgccggcctgtgtggtggactgtggcacggggtatacaaaactaggatatgctggaaatacagaaccacagtttatcatcccttcctgtattgctattaaggagtcagcaaaagtgggtgatcaagctcaaaggagggtgatgaaaggtgtttgatgacctagacttcttccattgngtgatgaagcaatagaaaaacctacatattgcaacaaagttggcccaatccgccatggtatagtntgaagattgggactttaatggaaaggtttatggagcaagtgatcttttaaatattttangggcagaaccctgaagaccattattttcttttgactgaacctccattgaatactccagaaaacagggaatatactgctgaaataatgtttgagtccttcaatgttccaggcttgtacattgctgtgcaggctgttcttgccttatctgcatcttggacctcaagacaagtaggagancggacgttgaccggtncggtaatagacagtggagatggtgtcactcatgtcattcctgtggctgaagggtatgtgattggcagctgtattaaacacattccaatcgcagggaccgaagatataacaatattttaattcaagcaacctgctgagagacccgagaagtagggaatccctccaagaaccaacccttggaaacctgctaaggcagtaaaggagcgctatagttatgtctgcccagatttagtaanagaatttaacaagtgcttttggaactaagagctagtatcttggattaactgatgcctgctagtgctttctgattactcgcattctgtttcttgctttaaaagaagagtaaagacaagagtgttggaccagtattgcagttctgtagtgtcatttcttataaaaaacnaaacaacaacaataatttatccaaattggcatatttaaagcctaacattctaataaaggcacaaatttctttttaaatacttgtttcagcctctttnatctctttataagttaactaataaatctattttcttcagacttctgcaatagttctttaaaatcaccacagttagcaagctgacttttgtaatgtgctcnaanaccaanacttgtgaacttttaatatgttgagtgctttcattttgataactggatctccatttgatattttcatttgnataactcatttgcagtctggaaattttttttagtgccagtccctggacatatcattgaaagttaattttctttgcattttaaaatatctggattatggaggaaaagtgatgnaaataaattaaaactgaattacc

SEQ ID NO: 21 - DNA, 561 bp, Homo sapiens
  modified_base (27): a, t, c, g, other or unknown
  modified_base (30): a, t, c, g, other or unknown
  modified_base (369): a, t, c, g, other or unknown
  modified_base (393): a, t, c, g, other or unknown
  modified_base (416): a, t, c, g, other or unknown
  modified_base (492): a, t, c, g, other or unknown
  modified_base (496): a, t, c, g, other or unknown
  modified_base (541): a, t, c, g, other or unknown
  modified_base (551): a, t, c, g, other or unknown
agccaggtttccgaggtgctgagaagncangaaactccgcagactactcctcagagagcaaaaagcagaaaactgaagaaaaggaaattgcagctcgttatgacagcgatggtgagaaaagtgatgacaacttggtggttgacgtttccaatgaggatccatcttcccctcgagggagcccagcacattcccccagagagaatggcctagacaagacacgcctgctcaagaaagatgccccgattagtccagcctctattgcatcttccagcagtactccctcctccaaatccaaagaacttagccttaatgaaaaatctactactcccgtctcaaagtccaataccccctactccacgaactgatgcngccacccccaggcagtaactctantcccgggatttgaggccttgtanctgggaaaaccaccaggagttggaccttttgggctcaagcctaaggaccccaatgggaagtacctttgtccatatncaantccatttggggattgtgcccatgctggaatgaacggggagctgancagcccgggngcgggctacg

SEQ ID NO: 22 - DNA, 450 bp, Homo sapiens
ccagagttttacattacacttgtctgtcttataattgatattttaggatgtttgggtgtttgttacaggcagaattggatagatacagccctacaaatgtatatgccctcccctgaaaaaaattggatgaaaatctgcacagcaaagtgaaacacacagataataggaacaaaatgtagttcccatgtgccaaacaaaataaatgaaatctctgcatgtttgcagcatatctgccttttgggaatgtaatcaaggtataatctttggctagtgttatgtgcctgtatttttttaaaatggtacaccagaaaaggactggcagtctacttctaccatagttaaacttcaccctctttaatttcacaacatattctttggaagcaggaagaaatgctcataaagaggatcagaccttctttcccgtgaaaccagtatttggcgccatatata

SEQ ID NO: 23 - DNA, 476 bp, Homo sapiens
cgtactgcttccgatatggtatcgacatcccgtatcttagttgcagtagtgaagatgtgctatgaggctaaagaatgggatttacttaatgaaaatattatgcttttgtccaaaaggcggagtcagttaaaacaagctgttgccaaaatggttcaacagtgctgtacttatgttgaggaaatcacagaccttcctatcaaacttcgattaattgatactctacgaatggttaccgaagcaagatttatgttgaaattgagcgtgcgcgactgactaaaacattagcaactataaaagaacaaaatggtgatgtgaaagaggcagcctccattttacaggagttacaggtggaaacctacgggtcaatggaaaagaaagagcgagtggaatttattttggagcaaatgaggctctgcctagctgtgaaggattacattcgaacacaaatcatcagcaagaaaattaacacccaaatt

SEQ ID NO: 24 - DNA, 278 bp, Homo sapiens
  modified_base (265): a, t, c, g, other or unknown
aattcggcccgagggtccttggtgcagatccacgaaaaaaacggctggtacacacccccaaaagaagacggctaaccctggagtatcacccttcctccctccccaggcaccactggaccaattacctttgaatgctgtatttggatctcacgctgcctctgtggttccctccctcatttttcctggacgtgatagctctgcctattgcaggacaatgatggctattctaaacgctaaggaaaaaaaacaaacacaggactgtttnaaagtactcaaga

SEQ ID NO: 25 - DNA, 237 bp, Homo sapiens
  modified_base (84): a, t, c, g, other or unknown
  modified_base (191): a, t, c, g, other or unknown
  modified_base (197): a, t, c, g, other or unknown
  modified_base (207): a, t, c, g, other or unknown
  modified_base (214): a, t, c, g, other or unknown
  modified_base (227): a, t, c, g, other or unknown
  modified_base (234): a, t, c, g, other or unknown
ggagtattggagaggcggccttatgaggaccaggggctcggggagacgactcctcttactatcatctgccagcccatgcagccnctgagggtcaacagccagcccggcccccagaagcgatgcctttttgtgtgtcggcatggtgagaggatggatgttgtgtttgggaagtactggcttgtcccagtgcntcgatngcaaaggcgnctacatncgcaagcaacctngaacatngcc

SEQ ID NO: 26 - DNA, 620 bp, Homo sapiens
  modified_base (82): a, t, c, g, other or unknown
  modified_base (448): a, t, c, g, other or unknown
  modified_base (491): a, t, c, g, other or unknown
  modified_base (507): a, t, c, g, other or unknown
  modified_base (525): a, t, c, g, other or unknown
  modified_base (530): a, t, c, g, other or unknown
  modified_base (548): a, t, c, g, other or unknown
  modified_base (593): a, t, c, g, other or unknown
  modified_base (614): a, t, c, g, other or unknown
aattcggcatgagggggcacagagccatcttcttcaatcggatcggtggagtgcagcaggacactatcctggccgagggctntcacttcaggatcccttggttccagtaccccattatctatgacattcgggccagacctcgaaaaatctcctcccctacaggctccaaagacctacagatggtgaatatctccctgcgagtgttgtctcgacccaatgctcaggagcttcctagcatgtaccagcgcctagggctggactacgaggaacgagtgttgccgtccattgtcaacgaggtgctcaagagtgtggtggccaagttcaatgcctcacagctgatcacccagcgggcccaggtatccctgttgatccgccgggagctgacagagagggccaaggacttcagcctcatcctggatgatgtggccatcacagagctgagctttanccgagagtacacagctgctgtagaagccaaacaagtggcccancaggaggccagccganatttcttggtagaaaaancaaanaggaacagcggcagaaantgtcaggccgaggtgagcgagctgcaagatgcttgagaacatganaagaacctggctacataactngcaaga

SEQ ID NO: 27 - DNA, 421 bp, Homo sapiens
  modified_base (335): a, t, c, g, other or unknown
  modified_base (412): a, t, c, g, other or unknown
  modified_base (421): a, t, c, g, other or unknown
aacgaaaagaatgggaatgacagtaacaaacaagatttccccactggatattgcgatgggactgcagcagtcttatctttgaaattcagaaaggaaacaactctgttccaaacagctaaatatgcaagtccaaaaaatgaaggtatgtttaactgccacattcactcgaagcccattcatctccttcagcatcccaatgaagtacacgatctgcttagctaaataaggtggcacacgcgctgcaccgctgacatcacaggacagttgcctataaaactagacttctgaccgcagggctccagcttcactttctcacaggtcatcatcctcatctngggagagcagtcgtctggagcaacctctaaaatcatgctcgtacttgtgctggccaaagctggggtccatgaccacntccaggtgn

SEQ ID NO: 28 - DNA, 426 bp, Homo sapiens
  modified_base (73): a, t, c, g, other or unknown
ttcgattgtggcccatgcaagcaaggagtaatggaacaaaacgaccagcaatgttagataatgaagccgacgnaataaaacaatgattgagctcagtgataatgaaaacccttggacaatattcctggaaacagttgatcccgagctggctgctagtggagcgaccttacccaagtttgataaagatcatgatgtaatgttatttttgaagatgtatgatcccaaaacgcggactttgaattactgtgggcatatctacacaccaatatcctgtaaaatacgtgacttgctcccagttatgtgtgacagagcaggatttattcaagatactagcctttatcctctatggaggaagttaaaccgaatttaacagagagaattccaggactatgacgtgtctccttgataaagccccttgatgaacta

SEQ ID NO: 29 - DNA, 558 bp, Homo sapiens
  modified_base (6): a, t, c, g, other or unknown
  modified_base (8): a, t, c, g, other or unknown
  modified_base (12): a, t, c, g, other or unknown
  modified_base (59): a, t, c, g, other or unknown
gagtgngncggnggtggcgcctgcggacctaactagctccaggttaggccgagctttgngggaaagcagcggacttgaaaatactggaaatctgtccggatccaaattattttgcaagccagatgagtaaccagagggcatgaaaggttgagaacatttgacttccctgcaaaccttggtatagatcacttccttttctgtaggaaaggaaaggcaccaaagagcacaatgagtacaagaaagcgtcgtggtggagcaataaattctagacaagctcagaagcgaactcgggaagcaacctccacccccgagatctccttggaagcagaacccatagaactcgtggaaactgctggagatgaaattgtggacctcacttgtgaatctttagagcctgtggtggttgatctgactcacaatgactctgttgtgattgttgacgaaagaagaagaccaaggaggaatgctaggaggctgccccaggaccatgctgacagctgtgtggtgagcagtgacgatgaggagttgtccagggacagagacgtatatgtgactacc

SEQ ID NO: 30 - DNA, 477 bp, Homo sapiens
  modified_base (269): a, t, c, g, other or unknown
  modified_base (388): a, t, c, g, other or unknown
  modified_base (472): a, t, c, g, other or unknown
ccagtgttctagttacattaatgagaacagaaacataaactatgacctaggggtttctgttggatagcttgtaattaagaacggagaaagaacaacaaagacatattttccagttttttttttctttacttaaactctgaaaacaacagaaactttgtcttcctactcttacattctaaaccgatgaaatctttaacagattacactttaaatatctactcatcattttctctctcagagtcctagcttgagttgcactgcatgtatcntgtgcatcttgttctcttcatttaatgctgtactgttctgctgagctctgagggactatcttgagagatgtaatggaaggaaagcgtggtgttaatctgcgtactgcttaagacagtanttccataatcaatgatgggttcatagagaaactaagtcctatgaacctgacctcctttatggctaatacgactaagcaagaatngaggg

SEQ ID NO: 31 - DNA, 550 bp, Homo sapiens
  modified_base (446): a, t, c, g, other or unknown
tcagactctcctcgttcgcgcagtcagctcggctccttccagcaaccatgtctgacaaacccgatatggctgagatcgagaaattcgataagtcgaagttgaagaaaacagaaacgcaagagaaaaatcctctgccttcaaaagaaacaattgaacaagagaagcaagctggcgaatcgtaatgaggcgagcgcgccaatatgcactgtacattccacgagcattgccttcttattttacttcttttagctgtttaactttgtaagatgcaaagaggttggatcaagtttaaatcgactgtgctgcccctttcacatcaaagaatcagaactactgagcaggaaggcctcccctgcctctcccacccatctgatggtctggctagcagagagggaaaagaacttgcatgttggtgaaggaaaaagctgggtgggagatgatgaatngagaggaaaatttcaagatggtccaagatgtcctggcaggatgtaaatggcagttttaatcagagtggcattttttttttggttcaaacaattttaattattgg

SEQ ID NO: 32 - DNA, 623 bp, Homo sapiens
  modified_base (125): a, t, c, g, other or unknown
  modified_base (535): a, t, c, g, other or unknown
  modified_base (544): a, t, c, g, other or unknown
  modified_base (575): a, t, c, g, other or unknown
ggcagtagcagaacacctgctctcatgaacttcatgatgacaggctcttgggtgacaattggtgcgacctttgcagccatgattggagctggaatgcttgtacactcaatatcatatgagcaganccaggcccaaagcatctggcttggatgctgcattctggtgtgatgggtgcagttgtggctcctctgacgatcttaggggggcctcttctcctgagagccgcatggtacaccgctggtattgtgggaggcctctctactgtggccatgtgtgcgcctagtgagaagtttctcgaacatgggagcacccctgggagtgggcctgggtcttgtcttttgcgtcttctctggggtctatgtttcttccccctacctctgtgggctggtgcactctgtactcagtggcaatgtatggtggattagttcttttcagcatgttccttctgtatgatactcagaaagtaatcaaacgtgcagaaataacacccatgtatggagctccaaagtatgatcccatcaatttcgatgttganatctacatngatacaattaatatatttatgcgagttgcantaatgctagcaacttgaagcaacagaaagaatgaagtaccgcttttta

SEQ ID NO: 33 - DNA, 464 bp, Homo sapiens
  modified_base (437): a, t, c, g, other or unknown
  modified_base (452): a, t, c, g, other or unknown
tattccaagcacactttccagtatgcttaccttgttacgacttatctcctctcataaacggatgtctagaaattaattatgttaagtttaatttaatttgaggagggtgacgggcggtgtgtgcgtacttcattgctcaattcaattaagctctctattcttaatttactactaaatcctccttagtcctttagtttcataaagggtatagtaatgttcttttataagaaaatgtagcccatttcttcccatttcattggctacaccttgacctaacgtttttatgtttgattcttttgcttactttaatacctttttagggtttgctgaagatggcggtatataggctgaattagcaagagatggtgaggtagagcggggtttatccgattatagaacaggctcctctagatggatataaagtaccgccaagtccnttgaagttttaagcnatggctagtagt

SEQ ID NO: 34 - DNA, 308 bp, Homo sapiens
  modified_base (96): a, t, c, g, other or unknown
  modified_base (294): a, t, c, g, other or unknown
  modified_base (299): a, t, c, g, other or unknown
  modified_base (306): a, t, c, g, other or unknown
ccgcgagacgtcggtgaggtgggactggtgactctcagaagctcctcggtgcacttttgtctcggcagactgggagggagcaggcgctcgcggaanaccgtcacttactgggtttgttcacctgtttccagcaagttttggtcttttgggcagaagcctgttgaccaactgtgggccaccacagtcttgcacagaaaggtggcacccggagtggtttgtggccctcactaccaaagccacgggaagcccaatttccagtaggattgccggttttgaattcttttcccaaaagcnaaatngagtttnac

SEQ ID NO: 35 - DNA, 435 bp, Homo sapiens
  modified_base (175): a, t, c, g, other or unknown
  modified_base (255): a, t, c, g, other or unknown
  modified_base (260): a, t, c, g, other or unknown
  modified_base (399): a, t, c, g, other or unknown
aaaaagccattaatattcaaacaaaggaatcacattttaaaaaccctatacataagaaacagcctccaggaacattcaagcagcagtcaggagggaaaaatgtttcaatagcccagttttcttcaaagtatgccagagaatacaatccaattcactgctacaattcatagaattngtcagtgttttcttgagacgctgaggttcactgttggcagtttccaagtggccgcatgtgctgctcagaaaggccagcgnagacnagctgcccggaagaactttcactgctggaaaactgctccgctcccaaggaaagcccaaggaaggctgggccgtgggctcacaacttcatcctttctccagggtcatccagctccacgtcacttgaggtcaatgtcgtcntccacagggaagctcaccatcctttgccatcccagg

SEQ ID NO: 36 - DNA, 505 bp, Homo sapiens
ccggcaacgtacaccttttttattaaggggcttctattgtgttctgaagttccatctctgtgacaacattaatatactttaaatacctgggatgtggtctggtacatacatggtggatgctgtgtgtgtattatatatactactatattatgaacacctgagtcatggaagtccttgcaaagtgtgccttaaaatcctcaacctttttaacttttctcatacatcgaagtcagtattcttatgaaggcccccatattgaaaaaagtcaccttgtcctgagaggttgtagccatcatcattttccagcggctgccatcttttattctgggaacgttttctgggttcactgacatcattactttgtactaagttttcctcgttgcttaaaaggctgctctgtagcaacaactgtctcatcccttcaaagcttttccaagcagtttagctatttgaaaagggggctttctaacttcatcttttcaaaataaactgctgggcatgcgtt

SEQ ID NO: 37 - DNA, 451 bp, Homo sapiens
  modified_base (2): a, t, c, g, other or unknown
  modified_base (421): a, t, c, g, other or unknown
  modified_base (451): a, t, c, g, other or unknown
tntttttgactttaaatgataaacttttattctgaatatactgtttttgcacaagatttaacacaacattttctgggattataaatattttataacagtattatacaaatttttacaaaatgtttttatcaggctaggtaattttcacaaaagtgtcaagagaacaaaataaaggggagaaaagatctattgttcacaaaagccagttggccttttgcatgaatgcacaccattttaataaaagtattcctaaaagcatgatccgacactcatacaacacaacaaaaaagacagctttactaggtcacattataaactcaactggcatctacacaagacagtatcccattagtttcagtggaatttgagataacttgtgtgaactagaaataaggtagatgaagagttgtccaattcttcnaaaatctggaattttttttcacactccaan

SEQ ID NO: 38 - DNA, 245 bp, Homo sapiens
gatttgccgtcttgtacccttaagagctacagctagagaaaccttcacggggtggagagaggattctaaggcttttctagcgtgacccttttcagtagtgctagtcccttttttacttgatcttaatggcaagaaggccacaaaggtacttttccttttttagctcaggaaatatgtcaggctcaaaccacttctcaggcagtttaatggacactagtccattgttacatgaagtgatagatagc

SEQ ID NO: 39 - DNA, 403 bp, Homo sapiens
aattcaaaggtaaatacactgagtaaagagctacattcagagttctcagaagttatgaatgaaatctgggctagtgatcaaatcagaagtgccgtccttatctcatcaaagccaggctgctttattgcaggtgctgatatcaacatgttagccgcttgcaagacccttcaagaagtaacacagctatcacaagaagcacagagaatagttgagaaacttgaaaagtccacaaagcctattgtggctgccatcaatggatcctgcctgggaggaggacttgaggttgccatttcatgccaatacagaatagcaacaaaagacagaaaaacagtattaggtaccctgaagttttgctgggggccttaccaggagcaggaggcacacaaagggctgcccaaaatgg

SEQ ID NO: 40 - DNA, 527 bp, Homo sapiens
  modified_base (473): a, t, c, g, other or unknown
  modified_base (499): a, t, c, g, other or unknown
ggacaatgacggcctccagtgtcctcctgcacactggacagaagatgcctctgattggtctggggacatggaagagtgagcctggtcaggtgaaagcagccattaaacatgcccttagcgcaggctaccgccacattgattgtgcttctgtatatggcaatgaaactgagattggggaggccctgaaggagagtgtggggtcaggcaaggcagtccctcgagaggagctgtttgtgacatccaagctgtggaatactaagcaccaccctgaggatgtagaacctgccctccggaagacactggctgatctgcaactggagtatttggacctctatttgatgcactggcccttaatgcctttgaagccggggagacaatccccttttcccaagaaatgccgaatgggaactgtcagatatgactccaactcactattaaagagacctggaaggctcttggaagtactggtggcnaaaggggctggtgaaagccctgggcnttgtccaactttcaacagtcggcaagat

SEQ ID NO: 41 - DNA, 449 bp, Homo sapiens
  modified_base (45): a, t, c, g, other or unknown
  modified_base (49): a, t, c, g, other or unknown
  modified_base (124): a, t, c, g, other or unknown
  modified_base (405): a, t, c, g, other or unknown
  modified_base (435): a, t, c, g, other or unknown
cataattcagaacagcacactgggagaagcagagattgagcgtgngggngagtaatcctgagagagatgcaggaagttgaaaccaacttgcaagaagttgtttttgattatcttcatgcgacanctatcaaaatactgcacttggacggacaattctgggaccaactgaaaatatcaaatctataaatcgtaaggacctagtggattacataaccacacactacaagggaccaagaattgtactggctgccgccggaggtgtttgccataacgaactgctggagttagcaaagttccattttggtgactctttgtgctcacacaaagggagctataccagctctgcctccctggcaagttcactggaagtgaagattcggggtgaagggatgaccaggatgcccnttggggaaccttggcaataactggtttganccaatttggttggg

SEQ ID NO: 42 - DNA, 411 bp, Homo sapiens
tcttcctggccaatgcgtctcgggcgcgctcagagcagttcatcaacctgcgagaggtcagcacccgcttccgcctgccacccggggagtatgtggtggtgccctccaccttcgagcccaacaaggagggcgacgttcgtgctgcgcttcattctcagagaagagtgctgggactgtggagctggatgaccagatccaggccaatctccccgatgagcaagtgctctcagaagaggagattgacgagaacttcaaggccctcttcaggcagctggcaggggaggacatggagatcagcgtgaaggagttgcggacaatcctcaataggatcatcagcaaacacaaagacctgcggaccaagggcttcagctaagagtcgtgccgcagcatgggtgaacctcatggatcgtt

SEQ ID NO: 43 - DNA, 455 bp, Homo sapiens
  modified_base (431): a, t, c, g, other or unknown
ttctcattaacaactcccacggtgggaagacagtttatcacttagtcttatacttttggacagctcacttctgcacaattgagatacatttgaagagtagtctgtttgcaatctgtcatattttaatccacaaacaaggagaactccctaaattgaacttgtctaaatccagctttcctcaacctccttcctaagacttagacaaattagtcattgagagcatctcctgattaaatgttccctagaagcagagccatcaacagagctggtgtcacctgaacaagaatgggaggttccaaagggaatactttcgagcttcatgcaaagtctaactcaggagggaacaggcctccctcctggctgaagagatgctccttatcctggacagcaatcagctggctctccttaagaaatgggtgggtcaaagggcnacatgagctcatgaaatgttcagt

SEQ ID NO: 44 - DNA, 312 bp, Homo sapiens
  modified_base (6): a, t, c, g, other or unknown
  modified_base (12): a, t, c, g, other or unknown
ctcacntgtagnagatatggagcggagagacgttgactttgagcttatcaaagtagaaggcaaagtgggcggcaggctggaggacactaaactgattaagggcgtgattgtggacaaggatttcagtcacccacagatgccaaaaaaagtggaagatgcgaagattgcaattctcacatgtccatttgaaccacccaaaccaaaaacaaagcataagctggatgtgacctctgtcgaagattataaagcccttcagaaataccgaaaaggagaaatttgaagagatgattcaacaaattaaagagactggtt

SEQ ID NO: 45 - DNA, 600 bp, Homo sapiens
tccggagcgcacgtcggcagtcggctccctcgttgaccgaatcaccgacctctctccccagctgtatttccaaaatgtcgctttctaacaagctgacgctggacaagctggacgttaaagggaagcgggtcgttatgagagtcgacttcaatgttcctatgaagaacaaccagataacaaacaaccagaggattaaggctgctgtcccaagcatcaaattctgcttggacaatggagccaagtcggtagtccttatgagccacctaggccggcctgatggtgtgcccatgcctgacaagtactccttagagccagttgctgtagaactcaaatctctgctgggcaaggatgttctgttcttgaaggactgtgtaggcccagaagtggagaaagcctgtgccaacccagctgctgggtctgtcatcctgctggagaacctccgctttcatgtggaggaagaagggaagggaaaagatgcttctgggaacaaggttaaagccgagccagccaaaatagaagctttccgagcttcactttccaagctaggggatgtctatgtcaatgatgcttttgcactgtcacagagccacagctccatgg

SEQ ID NO: 46 - DNA, 598 bp, Homo sapiens
  modified_base (130): a, t, c, g, other or unknown
  modified_base (488): a, t, c, g, other or unknown
  modified_base (513): a, t, c, g, other or unknown
  modified_base (537): a, t, c, g, other or unknown
  modified_base (543): a, t, c, g, other or unknown
  modified_base (567): a, t, c, g, other or unknown
ttatgccaaaaatggagaactacttaaatatattcgcaaaatcggttcattcgatgagacctgtacccgattttacacggctgagattgtgtctgctttagagtacttgcacggcaagggcatcattcanagggaccttaaaccggaaaacattttgttaaatgaagatatgcacatccagatcacagattttggaacagcaaaagtcttatccccagagagcaaacaagccagggccaactcattcgtgggaacagcgcagtacgtttctccagagctgctcacggagaagtccgcctgtaagagttcagacctttgggctcttggatgcataatataccagcttgtggcaggactcccaccattccgagctggaaacgagtatcttatatttcagaagatcattaagttggaatatgactttccagaaaaattcttccctaaggcaagagacctcgtggagaaacttttggttttagatgccacanagcggttaggctgtgaggaaatggnaggatacggacctcttaaagcacncccgtncttcgagtccgtcacgtgggaganctgcaccagcgacgcctccgaagctcaccgt

SEQ ID NO: 47 - DNA, 485 bp, Homo sapiens
  modified_base (277): a, t, c, g, other or unknown
  modified_base (479): a, t, c, g, other or unknown
  modified_base (484): a, t, c, g, other or unknown
aaattcagaaaggagtatttgaggtgaaatccacaaatggggataccttcttaggtggggaagactttgaccaggccttgctacggcacattgtgaaggagttcaagagagagacaggggttgatttgactaaagacaacatggcacttcagagggtacgggaagctgctgaaaaggctaaatgtgaactctcctcatctgtgcagactgacatcaatttgccctatcttacaatggattcttctggacccaagcatttgaatatgaagttgacccngtgctcaatttgaagggattgtcactgatctaatcagaaggactatcgctccatgccaaaaagctatgcaagatgcagaagtcagcaagagtgacataggagaagtgattcttgtgggtggcatgactaggatgcccaaggttcagcagactgtacaggatctttttggcagaccccaagtaaagctgtcaatcctgatgangctgng

SEQ ID NO: 48 - DNA, 293 bp, Homo sapiens
  modified_base (98): a, t, c, g, other or unknown
  modified_base (100)..(101): a, t, c, g, other or unknown
  modified_base (253): a, t, c, g, other or unknown
  modified_base (258): a, t, c, g, other or unknown
  modified_base (281): a, t, c, g, other or unknown
aaagaaatgaattgcagcagactattaataaattaaccaaggaccctggaagctgaacaacagaagttgtggaatgaggagttaaaatatgccagagnanngaagcgattgaaacacaattagcagagtatcacaaattggctagaaaattaaaacttattccctaaaggtgctgagaattccaaaggttatgactttgaaattaagtttaatccccgaggctggtgcaacttgccttgtcaaatacagggcncaagntttatgtacccccttaaggaacncccgaatggaaa

SEQ ID NO: 49 - DNA, 632 bp, Homo sapiens
  modified_base (573): a, t, c, g, other or unknown
  modified_base (600): a, t, c, g, other or unknown
  modified_base (619): a, t, c, g, other or unknown
  modified_base (630): a, t, c, g, other or unknown
ggcacagaatcaaaagtttctgtgggaattttaaatataaaacttgaaatgtatccaccactcaatcaaacgttatctcaagaagtagtgaacacacagcttgctttggaacgtcagaaaactgcagagaaagagcgattatttcttgtatatgctaagcagtggtggagagaatatttgcaaattcgaccctcacacaactcacgactggttaagatttttgcacaggatgaaaatgggataaatagaccagtctgttcctatgttaaaccacttcgagctggacggcttcttgatactccaaggcaagcagcaagatttgttaatgtccttggttatgaacgagcccctgttattggaggaggaggtaaacaggagcagtggtgcactctgctggcctttctctgtagaaacaagggtgactgtgaagatcacgctaaccttctgtgcagccttcttcttggatatggattagaagcctttgtttgtgttgggaccaaggcaaaaggagtacctcatgcatgggttatgacttgtggaactgatgggggcatcacttttgggagagtttanaggacccagtacctccctaaacctacnaatcccgatgaacctccantgctgaacagncc

SEQ ID NO: 50 - DNA, 582 bp, Homo sapiens
ccaagccatccaaaatccccaagcccccgaagccccctaagcccccaaggccccccaaaacgctgaagctcaaagatggaggcaagaagaaagggaagaagtcccgggagtcagcctcacccaccatccccaacctggacctgctcgaagcccacaccaaggaggcactgaccaagatggagccgcccaagaagggcaaggccacaaagagtgtcctgagtgtgcccaacaaagatgtggttcacatgcagaatgatgtggagaggctggaaattcgagagcaaaccaagagcaagtcagaggccaagtggaagtacaagaacagcaaacctgactccttactgaagatggaagaggagcagaagctagagaagtcgcctctagctggaaacaaagacaataagttctctttttctttctccaacaagaaactcctcggctccaaggctctcaggcccccgacgagccctggtgtgttcggggccttgcagaacttcaaggaggacaagcccaagctcgtgcgggatgagtatgagtacgtgtcggatgacggtgagcttcagatcgacgagtttcccatcc

SEQ ID NO: 51 - DNA, 523 bp, Homo sapiens
  modified_base (514): a, t, c, g, other or unknown
  modified_base (523): a, t, c, g, other or unknown
ggtgagctgcgacgtgactggctagctgcgtgggtactggaacaagcaaacgaggcagcgagcgaaggacgggagccggaccctgggccccgtggaactccagcctgcgccaccacgtcacgcacacgctcggcgctgcgatccgcgcatataacgatatttggatttgacctgcattttggaatttatctacacttaaaatgccaccagcagttggaggtccagttggatacacccccccagatggaggctggggctgggcagtggtaattggagctttcatttccatcggcttctcttatgcatttcccaaatcaattactgtcttcttcaaagagattgaaggtatattccatgccaccaccagcgaagtgtcatggaatatcctccataatgttggctgtcatgtatggtggaggtcctatcagcagtatcctggtgaataaatatggaagtcgtatagtcatgattgttggtggctgcttgtcaggctgtggcttgaattgcagcttcnttctgtaan

SEQ ID NO: 52 - DNA, 348 bp, Homo sapiens
  modified_base (4): a, t, c, g, other or unknown
  modified_base (11): a, t, c, g, other or unknown
  modified_base (68): a, t, c, g, other or unknown
  modified_base (219): a, t, c, g, other or unknown
gcangcgcaantaccggcgctcgccaaggaccctggaagctaccgttaccccgccggcagcgtgggcncatgagcagctcgggactgaattcggagaaggtagctgctctgatacagaaactgaattccgacccccagttcgtacttgcccagaatgtcgggaccacccacgacctgctggacatctgtctgaagcgggccacggtgcagcgcgcgcanatggtgttccagcacgccgtgccccaggagggaaagccaatcaccaaccagaagagctcagggcgatgctggatcttttcttgtctgaatgttatgaggcttccattcatgaaaaagttaaatattgaa

SEQ ID NO: 53 - DNA, 355 bp, Homo sapiens
  modified_base (8): a, t, c, g, other or unknown
  modified_base (19): a, t, c, g, other or unknown
  modified_base (22): a, t, c, g, other or unknown
  modified_base (24): a, t, c, g, other or unknown
  modified_base (117): a, t, c, g, other or unknown
  modified_base (217): a, t, c, g, other or unknown
ggcggcgncggcggcgtantangnagggtgcacagagaacacccctagcatgaacagtgtgaggattccaccagctttttcaccatgaaggagacagaccgggagccgttgcgacanaggtgcaaagggttgctgggatgctccagcgcccggaccagctggacaaggtggagcagtatcgcaggagagaagcgcggaagaaggcctccgtggacangaatttgaagagagcggatctgaaagctcaggtgcccgattctgtcctgtgggtcagccgtcctggggccaagttgtggtgctggctgaacagcaggaactcccccgccccaaagccagttgaagttcctgaccgttc

SEQ ID NO: 54 - DNA, 330 bp, Homo sapiens
  modified_base (4): a, t, c, g, other or unknown
  modified_base (9): a, t, c, g, other or unknown
aacnatgcngttttctccttctacacacttgggcgtcatgtctggagctgcagaggaggtggccactggagcagaggtggtggatctgctggtggccatgtgtagggcagctttagagtcccctagaaagagcatcatctttgagccttatccctctgtggtggaccccactgatcccaagactctggcctttaaccctaagaagaagaattatgaagcggcttcagaaagctctgggatagtgtgatgtctattccgggagatgacccagggctcataatttggaaatcaagaaacagatggacaaagtttggatccccctgggcccat

SEQ ID NO: 55 - DNA, 451 bp, Homo sapiens
  modified_base (3): a, t, c, g, other or unknown
  modified_base (281): a, t, c, g, other or unknown
tcngacagaaaagctgtacgttatatgttggaaatctttctttttacacaactgaagaacaaatctatgaactcttcagcaaaagtggtgacataaagaaaatcattatgggtctggataaaatgaagaaaacagcatgtggattctgttttgtggaatattactcacgcgcagatgcggaaaacgccatgcggtacataaatgggacgcgtctggatgaccgaatcattcgcacagactgggacgcaggctttaaggagggcaggcaatacggccgtggngaatctgggggccaggttccgggatgaagtatccggcaggactaccgatgctgggaagaggaggctaatgggaaaactggcacagaaccagtgagtggttgagagctctgtcagtgacaaacactcctttggcctgtttgaatttgctgaagaacatcacctaaagtcgg

SEQ ID NO: 56 - DNA, 355 bp, Homo sapiens
ggatgtggagtgatgggaacggttcacatactgactgtggatctcaagtataccattgaaaacccaaggcactttgtggactcacaccaccagaagcctgttaatgctatcatcgagcatgtgcgggacggcagtgtggtcagggccctgctcctcccagattactacctggttacagtcatgctgtcaggcatcaagtgcccaacttttcgacgggaagcagatggcagtgaaactccagagccttttgctgcagaagccaaatttttcactgagtcgcgactgcttcagagagatgttcagatcattctggagagctgccacaaccagaacattctgggtaccatccttcatc

SEQ ID NO: 57 - DNA, 468 bp, Homo sapiens
ttgttctggattcccgtcgtaacttaaagggaaattttcacaatgtccggagcccttgatgtcctgcaaatgaaggaggaggatgtccttaagttccttgcagcaggaacccacttaggtggcaccaatcttgacttccagatggaacagtacatctataaaaggaaaagtgatggcatctatatcataaatctcaagaggacctgggagaagcttctgctggcagctcgtgcaattgttgccattgaaaaccctgctgatgtcagtgttatatcctccaggaatactggccagagggctgtgctgaagtttgctgctgccactggagccactccaattgctggccgcttcactcctggaaccttcactaaccagatccaggcagccttccgggagccacggcttcttgtggttactgacccagggctgaccacagctctcaaggggcatcttatgttacctacctac

SEQ ID NO: 58 - DNA, 394 bp, Homo sapiens
acagtgtgccttcagcccgaggactcggactcggctcagactccggttctttgtttcctggaaggtggcacggggactcaggcggccagggtcgagggccaggtccaaggtcacagagctttggaggtcacctgtaggcggtcgcagggacggcgttgagacaggaactccttgggtggacaatgagcagggtgggagacaggggcctgggatgggggactccagaggtcagggtgtcctgggttggaggggaggggactcacggctcccaagcaggttcttagaacgtttgtcaatgtaaaggcagatgttggactgtaccagggtctgctcagagaccacctgctcccgacactcaaacgcagacctggggatctcggcaggtatgaactgc

SEQ ID NO: 59 - DNA, 296 bp, Homo sapiens
gccaggcgtactgacaggtggaccagcggactggtggagatggcgacgctctctctgaccgtgaattcaggagaccctccgctaggagctttgctggcagtagaacacgtgaaagacgatgtcagcatttccgttgaagaagggaaagagaatattcttcatgtttctgaaaatgtgatattcacagatgtgaattctatacttcgctacttggctagagttgcaactacagctggggtatatggctctaatctgatggaccatactttagattgatcacttggttggtaggttta

SEQ ID NO: 60 - DNA, 426 bp, Homo sapiens
cgggactcccgggaagtggaccggcagaagagggggctagctagctagtctgtgcggaccagggagacccccgcgcccccccggtgtgaggcggcctcacagggccgggtgggctggcgagcgacgcgcgcgcaggaggctgtgaggagtgtgtggaacaggacccgggacagaggaaccatggctccgcagaacctgagcaccttttgcctgttgctgctatacctcatcggggcggtgattgccggacgagatttctataagatcttaggggtgcctcgaagtgcctctataaaggatattaaaaaggcctataggaaactagccctgcagcttcatcccgaccggaaccctgatgatccacaagcccaggagaaattccaggatctgggtgctgcttatgaggttctgtcagatagtgagaac

SEQ ID NO: 61 - DNA, 461 bp, Homo sapiens
cgcttcctgtacaagggcgaggggctgaacaagatcagccatcggggactacctgggggagagggaagaactgaacctggcagtgctccatgcttttgtggatctgcatgagttcaccgacctcaatctggtgcaggccctcaggcagtttctatggagctttcgcctacccggagaggcccagaaaattgaccggatgatggaggccttcgcccagcgatactgcctgtgcaaccctggggttttccagtccacagacacgtgctatgtgctgtccttcgccgtcatcatgctcaacaccagtctccacaatcccaatgtccgggacaagccgggcctggagcgctttgtggccatgaaccggggcatcaacgagggcggggacctgcctgaggagctgctcaggaacctgtacgacagcatccgaaatgagcccttcaagattcctgaggatgacggga

SEQ ID NO: 62 - DNA, 422 bp, Homo sapiens
atcaacaaggagatgctaaaggttggaaagcagaaagccttggtcaaggatacagagctggacttgcatgggtattaggagatgctgaagaactgccctttgatgatgacaagtttgatatttacaccattgcctttgggatccggaatgtcacacacattgatcaggcactccaggaagctcatcgggtgctgaaaccaggaggacggtttctctgtctggaatttagccaagtgaacaatcccctcatatccaggctttatgatctatatagcttccaggtcatccctgtcctgggagaggtcatcgctggagactggaagcctatcagtaccttgtagagagtatccgaagtttccgtctcaggaagagttcaaggacatgatagaagatgcaggctttcacaaggtgacttacgaaag

SEQ ID NO: 63 - DNA, 280 bp, Homo sapiens
agaagtagagcagaagaagaagcggaccttccgcaagttcacctaccgcggcgtggacctcgaccagctgctggacatgtcctacgagcagctgatgcagctgtacagtgcgcgccaggcggcggctgaaccggggcctgcggcggaagcagcactccctgctgaagcgcctgcgcaaggccaagaaggaggcgccgcccatggagaagccggaagtggtgaagacgcaccttcgggacatgatcatcctacccgagatggtgggcagcatggtgggcgt

SEQ ID NO: 64 - DNA, 408 bp, Homo sapiens
  modified_base (167): a, t, c, g, other or unknown
  modified_base (175): a, t, c, g, other or unknown
ctgggagatgaaacagaggaagaagaaacaaagcccattgagctccctgtcaaagaggaagaaccccctgaaaaaactgttgatgtggcagcagagaagaaagtggtgaaaattacatctgaaataccacagactgagagaatgcagaagagggctgaacgattcantgtacctntgagcttggagagtaagaaagctgctcgggcagctaggtttgggatttcttcagttccaacaaaaggtctgtcatctgataacaaacctatggttaacttgggataagctgaaggaaagagctccaaagatttggtttgaatgtctcttcaatctccagaaagtcttgaagatgatgaggaaactgaaaaagagggaaggagcgatttggggattgtcacaagttcagctgga

SEQ ID NO: 65 - DNA, 463 bp, Homo sapiens
  modified_base (163): a, t, c, g, other or unknown
agccgctggggcgaggacggcgcgaggctgctgctgctgcccccggcccgcgcggctggaaacggagaggccgagccaagcggcggcccctcttatgctgggaggatgctggagagtagcggctgcaaaggctgaaggagggcgtgctggagaagcgcagacngggttgttgcagctctggaagaaaaagtgttgcatcctcaccgaggaagggctgctgcttatcccgcccaagcagctgcaacaccagcagcagcagcaacagcagcagcagcagcagcaacaacagcccgggcaggggccggccgagccgtcccaacccagtggccccgctgtcgccagcctcgagccgccggtcaagctcaaggaactgcacttctccaacatgaagaccgtggactgtgtggagcgcaagggcaagtacatgtacttcactgtggtgatggcagagggcaaggagatc

SEQ ID NO: 66 - DNA, 512 bp, Homo sapiens
cgcgccaagggacgtgtttctgcgctcgcgtggtcatggaggcgctgccgctgctagccgcgacaactccggaccacggccgccaccgaagctgcttctgctgccgctactgctgttcctgctgccggctggagctgtgcagggctgggagacagaggagaggccccggactcgcgaagaggagtgccacttctacgcgggtggacaagtgtacccgggagaggcatcccgggtatcggtcgccgaccactccctgcacctaagcaaagcgaagatttccaagccagcgccctactgggaaggaacagctgtgatcgatggagaatttaaggagctgaagttaactgattatcgtgggaaatacttggttttcttcttctacccacttgatttcacatttgtgtgtccaactgaaattatcgcttttggcgacagacttgaagaattcagatctataaatactgaagtggtagcatgctctgttgattcacagtttacccatttggctggga

SEQ ID NO: 67 - DNA, 367 bp, Homo sapiens
  modified_base (95): a, t, c, g, other or unknown
  modified_base (315): a, t, c, g, other or unknown
ggagagcaacattaggatctacagcgagaggccccctcctggctgagcaaagatgacatccgaagaatgcgactcttggcggacagcgcagtggncagggctccggcctgtgtcctctaggagcggagccgtttgctggtgctggaggggggcgcacctggcgctgtgctccgctgtggccctagcccctgtgggcttctcaagcagcccttggacatgagtgaggtgtttgccttccacctagacaggatcctggggctcaacaggaccctgccgtctgtgagcaggaaagcagagttcatccaagatggccgnccatgccccatcattctttgggatgcatctttatcttcagcaagtaatgaca

SEQ ID NO: 68 - DNA, 402 bp, Homo sapiens
tgcagatgtagatcctgaaaaccagaactttttacttgaatcgaatttggggaagaagaagtatgaaacagaatttcatccaggtactacttcctttggaatgtcagtatttaatctgagcaatgcgattgtgggcagtggaatccttgggctttcttatgccatggctaatactggaattgctctttttataattctcttgacatttgtgtcaatattttccctgtattctgttcatctccttttgaagactgccaatgaaggagggtctttattatatgaacaattgggatataaggcatttggattagttggaaagcttgcagcatctggatcaattacaatgcagaacattggagctatgtcaagctacctcttcatagtgaaatatgagttgccttt

SEQ ID NO: 69 - DNA, 545 bp, Homo sapiens
  modified_base (17)..(18): a, t, c, g, other or unknown
  modified_base (47): a, t, c, g, other or unknown
  modified_base (469): a, t, c, g, other or unknown
gcggcgtgcggcacgtnncagggctgaagcggcggcggcggtggggnctgcacgtagcccggcgctcggcatggctctcctggtgctcggtctggtgagctgtaccttctttctggcagtgaatggtctgtattcctctagtgatgatgtgatcgaattaactccatcaaatttcaaccgagaagttattcagagtgatagtttgtggcttgtagaattctatgctccatggtgtggtcactgtcaaagattaacaccagaatggaagaaagcagcaactgcattaaaagatgttgtcaaagttggtgcagttgatgcagataagcatcattccctaggaggtcagtatggtgttcagggatttcctaccattaagatttttggatccaacaaaaacagaccagaagattaccaaggtggcagaactggtgaagccattgtagatgctgcgctgagtgctctgcgccantcgtgaaggatcgctcgggggacgaagcggaggatacagttctggaaaacaaggcagaagtgatagttcaagtaag

SEQ ID NO: 70 - DNA, 359 bp, Homo sapiens
  modified_base (103): a, t, c, g, other or unknown
  modified_base (265): a, t, c, g, other or unknown
  modified_base (274): a, t, c, g, other or unknown
gcctactgcaccgccgaccacaacgtgagccccaacatcttcgcctgggtctacagggagatcaatgatgacctgtcctaccagatggactgccacgccgtgnagtgcgagagcaagctcgaggccaagaaactggcccacgccatgatggaggccttcaggaagactttccacagtatgaagagcgacgggcggatccacagcaacagctcctccgaagaggtttcccaggaattggaatccgatgatggctgaatgaactttnagacgcttnagcaaaggcagcattggtcacggggttcaagggaattagattgagtaagcaacgtttcaaatttgggatgaaagatttccaaatt

SEQ ID NO: 71 - DNA, 392 bp, Homo sapiens
  modified_base (7): a, t, c, g, other or unknown
  modified_base (184): a, t, c, g, other or unknown
  modified_base (306): a, t, c, g, other or unknown
ctatgtngcaattccaagaccaagtcagtagtattacagctggctgatggccagatatttaagtacctttgggagtcaccttctctggctattaaaccatggatgaactctggtggatttcctgttcggtttccttatccatgcacccagaccgaattggccatgattggagaagaggaatgtntccttggtctgactgacaggtgtcgctttttcatcaatgacattgaggttgcgtcaaatatcacgtcatttgcagtatatgatgagtttttattgttgacaacccattcccatacctgccantgtttttgcctgagggatgcttcatttaaaacattacaggccggcctgagcagcaattcatgtgtcccatggggaagtttctgcgg

SEQ ID NO: 72 - DNA, 344 bp, Homo sapiens
  modified_base (80): a, t, c, g, other or unknown
  modified_base (89): a, t, c, g, other or unknown
  modified_base (137): a, t, c, g, other or unknown
  modified_base (196): a, t, c, g, other or unknown
  modified_base (310): a, t, c, g, other or unknown
gagttcacagaccgcactttggcacgttgtcctcactgcaggaaagtgtcatctattgggcgcagatacccacgtaaganatgtatctnctgcttcttgcttggcttgcttttggcagtcactgccactggccttgnctttggcacatggaagcatgcacggcgatatggaggcatctatgcagcctgggcatttntcatcctgttggctgtgctgtgtttgggccgggctctttattgggcctgtatgaaggtcagccaccctgtccagaacttctcctgagcctgatgacccacagactgtgcctggnccctccctggtggggacagtgacactacgaaggg

SEQ ID NO: 73 - DNA, 311 bp, Homo sapiens
  modified_base (130): a, t, c, g, other or unknown
gtgggatggggtgcccttcatcctgcgctgcggcaaggccctgaacgagcgcaaggccgaggtgaggctgcagttccatgatgtggccggcgacatcttccaccagcagtgcaagcgcaacgagctggtnatccgcgtgcagcccaacgaggccgtgtacaccaagatgatgaccaagaagccgggcatgttcttcaaccccgaggagtcggagctggacctgacctacggcaacagatacaagaacgtgaagctccctgacgcctatgagcgcctcatcctggacgtcttctgcgggaccagatgcactt

SEQ ID NO: 74 - DNA, 176 bp, Homo sapiens
  modified_base (109): a, t, c, g, other or unknown
  modified_base (152): a, t, c, g, other or unknown
ctgttccttggaaatgtttgatgctactctgaaagatcgagaactgagctttcagtcggctccaggtactaccatgtttctgcattggctagtgggaatggtatatgtnttctactttgcctccttcattctactactgagagaggtacttngacctggtgtcctgtggtttctaa

SEQ ID NO: 75 - DNA, 276 bp, Homo sapiens
  modified_base (91): a, t, c, g, other or unknown
ccaagattggttccagcgccagtacctgtcaactccagatagtcagtctctgcgctgtgacctcattcgctacatctgtggggtagtccanccttctaatgaagtactgagttcagatatcttgccccggtgggccatcattggttggctcctgacaacgtgcacgtcaaatgtcgctgcctccaatgccaagctggctttgttttatgactggctgttctttagtccagacaaggatagcattatgaacatagaaccagccatcctggtcatgca

SEQ ID NO: 76 - DNA, 310 bp, Homo sapiens
  modified_base (277): a, t, c, g, other or unknown
acaccctcctgtgcaatgggtattggcttgcctggctgattcatgtgggagagtccttgtatgccatagtattgtgcaagcataaaggcatcacaagtggtcgggctcagctactctggttcctacagactttcttctttgggatagcgtctctcaccatcttgattgcttacaaacggaagcgccaaaaacaaacttgaagttgtctgaaagcttgctctacacttttacattcatcctcacccttttttttgtggggtagaggaggttgcagtantttactcagtgatctttctactttctagaaact

SEQ ID NO: 77 - DNA, 295 bp, Homo sapiens
  modified_base (247): a, t, c, g, other or unknown
cctcactgctatgggccgcaacaagaagaagaagcgagatggtgacgaccggcggccgaggctcgttcttagcttcgacgaggagaagaggcgggagtacctgacaggcttccacaagcggaaggtcgagcgaaagaaggcagccattgaggagattaagcagcggctgaaagaggagcagaggaagcttcgggaggagcgccaccaggaatacttgaagatgctggcagagagagaagaggctctngaggaggcagatgagctggaccggttggtgacagcaaagacggagtcg

SEQ ID NO: 78 - DNA, 406 bp, Homo sapiens
  modified_base (13): a, t, c, g, other or unknown
  modified_base (102): a, t, c, g, other or unknown
  modified_base (105): a, t, c, g, other or unknown
  modified_base (231): a, t, c, g, other or unknown
  modified_base (340): a, t, c, g, other or unknown
caaaaagctggtngcctccagacccgactttttcaaccaggagcaccagacacgggatgtggactgtgtcctcacaacaggagaagttttcaggttgctggnggnagagggggctcggggggctacctggagcacgtgttccggcacgcggcccgagagctctttggaatccatgtggctgaggttacctacaaacccctgaggaacaaagacttccaggaggtgacactngagaaggagggccaggtgctgctgcacttcgcaatggcgtacggcttccgcaacatccagaacctggtgcagaggctcaaacgagggcgctgcccctaccactacgtgnaggtcatggcctgcccctcaggctgcctgaacggcggggggccagctccaggtcccagacaaggcc

SEQ ID NO: 79 - DNA, 288 bp, Homo sapiens
  modified_base (35): a, t, c, g, other or unknown
  modified_base (108): a, t, c, g, other or unknown
  modified_base (170): a, t, c, g, other or unknown
  modified_base (195)..(196): a, t, c, g, other or unknown
  modified_base (233)..(234): a, t, c, g, other or unknown
aagaaggagaggaaggagaagagacggcagaggangggggaagagtgcagcctgcctggcctcacttgcttcacgcatgacaacaaccactggcagacagccccgttntggaacctgggatctttctgtgcttgcacgagttctaacaataacacctactggtgtttgcntacagttaatgagacgcataatttnnttttctgtgagtttgctactggctttttggagtattnngatatgaatacagatccttatcagctcacaaatacagtgcacacggttagaacg

SEQ ID NO: 80 - DNA, 322 bp, Homo sapiens
aaacagcagctggtggttaacaagtggatcgtcatgttcagtagtttatacattatgtgagaagtaacgttctgattctttttcttacacagaattggcagagggggtcgatttgggaggaaaggtgtggctataaactttgttactgaagaagacaagaggattcttcgtgacattgagactttctacaatactacagtggaggagatgcccatgaatgtggctgaccttatttaattcctgggatgagagttttggatgcagtgctcgctgttgctgaataggcgatcacaacgtgcattgtgcttctttcttttgggga

SEQ ID NO: 81 - DNA, 361 bp, Homo sapiens
attctctaaaatgcttaatgcctttgaaattttgtaatcaaaaaaaagctttgaaaaaatctaaaggggagagtattctttaaagtttttaacataagcttgtcaatgcacatgtagatggttagcatgtttagcaaaccttgtgaaattataataagtttgtagttacatgtgaaactctaaatgcatggcaactgttaatgtcataacagtttagttattttgttctgttctgtcatgtgccacaaaatatgtacttttttcacttttttccctttgtatatcagttacgggttacaactggttcattctgaaaacaacaacaacaaaagtccattcatattttttaaccattgtatag

SEQ ID NO: 82 - DNA, 206 bp, Homo sapiens
tttttttttttagtagttgcaacttcagcacatctttattagaactctttcattgtgggtaaacagccacaaaaataaatgctgacttagaaagtataaacgcaaatatttaaacaaaaatgtttgcagcattcatagcgcaaattgtacctgaactggaaagccgaattctgcagatatccatcacactggcggccgctcgagca

SEQ ID NO: 83 - DNA, 563 bp, Homo sapiens
catcagctctcttcgttgctgtgggaacactggccagaggtgtaccactgcgaggcgactgtttatacatgaaagcatccatgatgaggttgtaaacagacttaaaaaggcctatgcacagatccgagttgggaacccatgggaccctaatgttctctatgggccactccacaccaagcaggcagtgagcatgtttcttggagcagtggaagaagcaaagaaagaaggtggcacagtggtctatgggggcaaggttatggatcgccctggaaattatgtagaaccgacaattgtgacaggtcttggccacgatgcgtccattgcacacacagagacttttgctccgattctctatgtctttaaattcaagaatgaagaagaggtctttgcatggaataatgaagtaaaacagggactttcaagtagcatctttaccaaagatctgggcagaatctttcgctggcttggacctaaaggatcagactgtggcattgtaaatgtcaacattccaacaagtggggctgagattggaggtgcctttggaggagaaaagcacactggtg

SEQ ID NO: 84 - DNA, 450 bp, Homo sapiens
atttggtgtgttcatgaacacgctaaatggcttggtaaatgggtgtggttcaaagcctgatgcttcaagatctctggtttgaatttggtcacaaccaggaagtattgcccctttttctgtctgggtcctcaataggaacttttcataccagccataaacaatccagatggctgccacgtggtccttaccagtgagaggcgtcacacagcacacactgcatgaatggggatgaaatcattcctgaattaatatagggttatattacttggacctcagccatttgagcctcagtgtctgcatcatatgtgtttagtatatggacatctaactgaaattattaacgtggcaatttatgcgtgccttttttggaaatattctattttaatggaaagaattatgtagaaatactggatacatttttaaaaacatccataattcaccatcttgaca

SEQ ID NO: 85 - DNA, 320 bp, Homo sapiens
ccattagtgttcacactcagacatttttgcccagctctaaggtaacttcatctatagctgctcagactgatgcatttatggacacctgtttccagtcaggtggggtctccagagaaactcaaaccagtgggatagaaagtccaacggatgaccatgtacagatggaccaagctggaatgtgcggagacatttttgagagtgttcattcatcatataatgttgctacaggtaacattataagcaacagtttagtagcagagacagtaactcatagtttgttacctcagaatgagcctaagactttaaatcaagatattgag

SEQ ID NO: 86 - DNA, 524 bp, Homo sapiens
aattcggcacagggtgggtctttgagtttcagtgagtttgctgaaatgtcgaagaagtagttccaaacttcaatgttcaatgaaatttttgttcaagtttgaaatggagagagcagctataaaaggtactaagccttttacaaattggtgagtactggcacatgagatctagagcaggagcaacttctcacacatagtaagtgggaaaagaaagtgctttgaaagttcctccctcacctacacagtagtcgtcatgtcgagacctgccagagagagacacattctcaagtgaatcctggcttcttggaagcgcttgcctagacgagacacagtgcataaaaacaacttttgggggacaggtatgttttcttgcagctgcggttgtaaggtcttggcaagacaagcagtgtggccagaattttgaacttctgatgaatgtgtaatgcaaaggaccttgtacatttttttgtttcaaggtcctcaaaatgagcacatgaagaggttgctgtgaaactttaagtggc

SEQ ID NO: 87 - DNA, 439 bp, Homo sapiens
ctctgggcccctctcttgggtctgtgctgcagtctggccgctgctgatcgccacaccgtcttctggaacagttcaaatcccaagttccggaatgaggactacaccatacatgtgcagctgaatgactacgtggacatcatctgtccgcactatgaagatcactctgtggcagacgctgccatggagcagtacatactgtacctggtggagcatgaggagtaccagctgtgccagccccagtccaaggaccaagtccgctggcagtgcaaccggcccagtgccaagcatggcccggagaagctgtctgagaagttccagcgcttcacacctttcaccctgggcaaggagttcaaagaaggacacagctactactacatctccaaacccatccaccagcatgaagaccgctgcttgaggttgaaggtaactgtcagtggca

SEQ ID NO: 88 - DNA, 376 bp, Homo sapiens
tgaattgaaggagctgcaaaaaacctttgaaatctccattgggagaaaagatgaggtgatttctagcttgtctcatgccataggaagcaaaaggaaaagatagagttgatgagaacattcttccactggcgaatcggccatgtcagagccagacaggatgtttatgaaggtaaactagctgaccagtactaccagagaactttactgaagaaagtctggaaagtctggcgttccgtagtgcaaaagcagtggaaagatgtggtagaaagagcttgtcaagcaagagctgaagaagtttgtatccagatttccaatgattatgaagccaaagttgctatgttatctggagctttggaaaatgcaaaagctgagattc

SEQ ID NO: 89 - DNA, 341 bp, Homo sapiens
gtgagaacaggtcctacgagggcactctgtacaagaagggggccttcatgaagccttggaaggcccgctggttcgtgctggacaagaccaagcaccagctgcgctactacgaccaccgtgtggacacagagtgcaagggtgtcatcgacttggcggaggtggaggctgtggcacctggcacgcccactatgggtgcccctaagactgtggacgagaaggccttctttgacgtgaagacaacgcgtcgctttacaacttctgtgcccaggacgtgccctcggcccagcagtgggtggaccggatccagagctgcctgtcggacgcctgagcctcccagccct

SEQ ID NO: 90 - DNA, 394 bp, Homo sapiens
cttggcgttaccagttattacccaagatggagattggaccagtatcatcttcaagatttggtcactattatgatgcatcaaaaagaatgccacaagaactaattgaggcttcaaattggcatggattttttcttccagagaaaatatcttcaactctcaaagtagaaccctgttctttgacccctggctacacaaagctgcttcagtttatccagaacatcatttatgaggaaggatttgatggatccaatcctcagaaaaaacagagaaacattttaagaataggaattcagaatcttggctcacctttatggggagacgatatttgctgtgagaaaatggtggcaacagtcacagccttaccaagttcctctatgttctccgtggtcttctg

SEQ ID NO: 91 - DNA, 153 bp, Homo sapiens
acccatgggatgagtgttttattcatgctgtttccaggaagggatgtcaaagctggaccagtcgaaacccttggaggctttttttgcagttggccacaggggtgttggaggcctgcttatgggtcctcgatgtcgagaaactcctgcttgggg

SEQ ID NO: 92 - DNA, 479 bp, Homo sapiens
  modified_base (401): a, t, c, g, other or unknown
  modified_base (405): a, t, c, g, other or unknown
cattgggcctctagatgcatgctcgagcggccgccagtgtgatggatatctgcagaattcggcttagcgtggtcgcggccgaggtacattcttgtagaaccgggttcgtttttccagttttgtagaaaaatagatgttccagccaccatttacttaactgtctaatatttaagaccaatcaatatgttccctggaaagatgaaaaagtctcatgactaactcgtttttttaaaaattctttaaaacaaaaagtgtgtgtgtgtgtgtgtgtgtgtttactctcaaagcacagcatttccacagcagcagccaacatggggtttagtagcttcactcacccctaactaaagctttgaataaaccagtgatttactacaaaaaacactgtccttgaaagaaangacngcagtcatacatgaacgtgaaacttggaatgatcaggtcctaaacatggcacttaaaaagttacttatcaaaac

SEQ ID NO: 93 - DNA, 560 bp, Homo sapiens
ttttttttgccagtgccaggataaaaagcaaaattttaaattggaaaatgtctagcactttacacagtggaatgaaagaatacgaaattcaaaaacattattaaaagtccatatgccgcagcagcacgcgccatgatgagagctccccttccgaggcgcttctggagcagcttcctcaacctgtccgggagacgggctcagaagagcagggcccccatgctgccaacctcgctttgctccttaacgaagatctcaaagtactggtagatgattgtgactgcgagcaggatcccggttccagacccaatggcgcctaggaagtcagccaggaccgagagggccccgatgcacagcccaccaaaggccgcggctgtggggatgtaccggttgagttcatggaccatggaggtctctcggtggcctctcatcaccatctgctgctccttcagctgctttgcaacatctttggcagaggaacctgagacctcaatccacgttttggagaagaatgcacaggagcccagcatgaacactatgtatacaactgcatggaacgggtc

SEQ ID NO: 94 - DNA, 396 bp, Homo sapiens
gacctcttaccttactgatgctggcaaataacaaatacagatggtaatagactctggaatagttcctcatttggttcctctgctcagccaccaggaagttaaagttcagactgctgcacttagagctgtgggcaacattgttactggaactgatgggcaaacacaagtagttttgaactgtgatgctctttcacacttcccagcactcctgacacatcccaaagagaaaattaataaagaagcagtgtggttcctctccaacatcactgcaggaaatcagcagcaggtacaggcagtaattgatgccaatcttgtaccaatgataatacaccttttggataagggggattttggcccaagcagcttctttttgagtgccaagtcgacgcggccgga

SEQ ID NO: 95 - DNA, 622 bp, Homo sapiens
atggagagtcacttaataataaattttctctatagtaggtaaatccgatgaaaggcagctgatttccaacaaaagctttaggaattgggaaggtttctacatctcctttgtcatcttcaatgtcatcgaaattgctgctgtctatgtcactgctgagttcaggtactacaggagctgccgtttctcttatgttatcccaatgccactgatcattcttaaagaaaggatgctgtctgatttcttccaccccatttctcccaagtcgtacctccctatctgttaagaaagcacagatgagattctttgcatgtttggaaatttctgcatcttcagggaaacacagtgaattcttatgatccataattttgctatatgttcctacaagtgaatccgcataaaatggagtatcccccactagcatctcataaaggaaaacacctacagaccaccaatcacattctcgcccatagaaaccatcacccccttgtgatttcagaacctcaggtgatatataatccggtgttccaactgctgtatcacaatgtaccatgcctgtttcatccatcttcatacaggtgccaaaatctgctaattttagatggtcatgtttatcacagagcat

SEQ ID NO: 96 - DNA, 445 bp, Homo sapiens
ggaagggatggaaaaaaggaaaagcaatagaaactgtccaattcacatcagttatccgtctgctttttcttgagagcttgtggaaggtgttaacgtggctgggaacatcaacaccttggcatgcatgaatgttaagtcaggaaggccagcgatcaccttgatagcttcttcacttaggtgctcttctcttttcggtttcctggtagatgtgcttgtcttctctactgtagacatgagtcttgcaaatgcatcagtcactttgaggcttgaggtggagatttccagcttagaagttgttaactcatacaactccggatccacaccatctaaagggttagtaaggccactgctactccagtcaaactggacgggtggtagagactcctggaactgatcagatgtacatgtgttcatatctggtgacatggtggctgtctgaccgatg

SEQ ID NO: 97 - DNA, 541 bp, Homo sapiens
cttctttctctttatcctggagcccctttctctcaggtactagcgtagagggttaacccacagatcattcttgataatctcagcaatcctgtcagcctctgggaggtatggtttgagaaccagctgaaaaagctgtggctcgcatcctggttcccgtgacgacggcctggggttcctggccccggtgccagcggattggggttgagtgagacaccagccggcctgagcggttgcgctggaactccttgacaatcaccatgtttgtgaagtaggggttagtctggaagtacagcttcattttgtagcccatggagatatgtctgagatcctgtacctgcagaatgggtcaagtagcggaaaaatgtcttcatcacgtcggttgatcaaaattggaattctggggtggtttaggaactgatgagtggagtgctttgacccagaagcctgggatatgccggatgatgaggtctctgcgctccaggaagggtcttcgcatctggatgaacttgcgcttgagacgcatgaaggctttgctgccttg

SEQ ID NO: 98 - DNA, 384 bp, Homo sapiens
atttggaccggcatgcaggcaacttcttttgttgttacatacctgtattaggaaaattacacccattttacagaaaaatcccaaaacatatactgcaataagctcaaaacaatgtgaaaaagaccagtgtgaatggcacacaaaaatcgcctctttataaattaactggaattcatgatcatgaagtaggcacagggaaatccagtcctcagggctttgctctctggaagaacacctttaagtaatttttaaaaactttagcatcaggctgctgaagcgcttgacaaaactcctgaattatttctggagctacttgcaaggagggcaggtattcttgttgaagatactgaacacattctgggccccgtttgagatgaattgttt

SEQ ID NO: 99 - DNA, 535 bp, Homo sapiens
ttttaatttacaaaaggtaggctccgtttattagagtcacacacaactgactatctcagtgtgactcaagaccacaaaaaacccatttctccttcacttctgagtcctggggttaatacctagaccagcaagtgtactgcttggggtccattcacaggtttacaagtttttcattgagtgcaatctgtgactgtgtgaggttggccaggtaggtcaccatcaaaaggtcattgatgttgctgttgagcatggtctcaaagtcatcgggaactattttcggtacttggttaaccaggctcatcaggaagcggcccacagtattgtcagctgacacctttccagacagtacatcctctgcatattgcaacactgtactcagggcatcctggatgcgagctgatgcccctcctacttgctgcaagtcacttgagagtccaatcactctgttggggctaaagcaggtcttcatgatcaggtcaactccgatgcgttcagtgtcgtagtacgcgtatttcactgtcagaggggtgaacat

SEQ ID NO: 100 - DNA, 452 bp, Homo sapiens
tgtatctttgatgaggttagttttggtattacagcaaattttttttcttctgacaaatctgtgctgtgtttatattaactaaatctttaaaaatacgaatcctgagctagagtaaaaacaacaattttgactaaagaataaatcccttcattgttaaacctaaacagctttaaaattcagccatggaacataagataagactggaattcaaacttctgatgtccatggcaaacctgaatactctcagcagaaataaaacacacatagtagataatacacaatagtaaaaagcatcagaaattgatgcacctggattttgttaaatacaacaaaggtcactcagtccttcatggataaacctagctgggagaatagcactgaacagtgtattgcattgagcagaaatccctcagaaaggcaacactggattcatttttagacaggcatagact

SEQ ID NO: 101 - DNA, 447 bp, Homo sapiens
tttttcaatcctgatagttctttattttttcaaaatatatttgccatgggatgctaatttgcaataggtgtcataatgagaataacccaaactggataaatgtgacaaatgattgacaaagcatttcacacccttcaattacaccacatcaagaatgaggggaaagcgttgtaaaagtagactactgcaatgctacttatattcttgcaataaaaccagcaagcatccatatcaagagagttatcatctcacttccaactttttcccctcaagaacaatttgaatctctttggcatccaaagtctcataggtcaataaagcttctgcgagattcttatgctcctttgcatgagttttcaagatatgttttgctcgttcatatgagtcacttagaaggattcttatttcatgttcgatggcagattgggtttctggacttaggtttcc

SEQ ID NO: 102 - DNA, 368 bp, Homo sapiens
tttttttcaaaaaaagaaatcttttaataaaaattactcataaaaatcctaataaattttaaagagcaagatattccttattacatttataaaagaacatttggtccttttacaaaaagatcccttttaatttaaatacatttcttatttacagattaaacataaaatatcatctacagttgcaaagcatattgcacattacagagaagcatttgtgtatttccgtaagttttcccagagtttccaactctatacttttttttgtaaaaagatttacctttcttatgcaaaataaataaaaatgcagcttgtgttttgctatttaaaactaaaacaaaataacctttaaaaatattattcctctgcct

SEQ ID NO: 103 - DNA, 685 bp, Homo sapiens
tgggatctttttttatttttatacacatgacaagattttacaccaatagtcagttaaatagtacaaatttacattcaggaggaatgttaaaaaaaattcaactaaaaaaaccacttcttcctgtgacccataatcccaacattttacagtgcaggggagaaggaggcttggggaagcatccaaaacaagtctctcaaaagaaatgacttcaaaacttcacattccctctccacacgggattcatagcgagagtataatttacaattcatccttctctgtagattccttttctgtttcctcctcttcttcttctgtccctgcatccatctcttctccctcatcctgctctgagtcttctgcgtcttctgaggtgtcttcaaggctcttcttctggttcttcctccaactgtgcttcaggggcaaaggttaaactgaggcgaagattctttccaatcgaactccatacgccttggtgtccggtagaagataacctgacccaagtgttgacggtttcaaacaaaactacagcaagaaccatgactgtcctggcaacttcaacgtccttaaatcggcggaaaatgtctccgaacaggggggggtctggaatgagttcgaacgttttccttagaccggcatagtaatttgtagagaaagtccttgccggccggtaaggctgtggcttcaa

SEQ ID NO: 104 - DNA, 676 bp, Homo sapiens
  modified_base (520): a, t, c, g, other or unknown
gctcatttttaatttttattgattttttaatgctgcacaacacaatatttatttcattttgaatttcatttatttctttatttctgttgctgcttttattttatttactgaaagtgagagggaacttttgtggccttttttttctttttcttctgtaggccgccttaagcttactaaatttggaacatctaagcaagctgaagggaagaggggtttttcagaatcactgggggaaaaaggaaaggttgcggtgttgatcatgccctatggtgggtgaccaactgcttgtacaattacgtttcactcttaattaattgtgcttaaggctgaattaaatttgggtgttcccttcttagagcagctcgtattggcggagatgcatgcgctggatgatgtcacggcagtcgttgaagacacggcggatgttctcagtgtccacggcgcaggtaaagtgagggtagcagtagtggcgccatctccactagcagtgctgattctcagaaactcatcccgaatgaangtacttggccgggtcacgcgtgggtcctctcccggctcgggagtcgcatccctacagagtgtgtagcgagcgaactctggaaagtagtcctcaatctcgatttgccaccgggacttctcagcagcaggtcttgcttgtgtagaagagatcacaaga

SEQ ID NO: 105 - DNA, 367 bp, Homo sapiens
gacgggaactgaacgcggttctgggagcagcaagcccacgggtagcagccgaggccccagaatggccaagtttctttcccaagaccaaattaatgagtacaaggaatgcttctccctgtatgacaagcagcagagggggaagataaaagccaccgacctcatggtggccatgaggtgcctgggggcagcccgacgccaggggaggtgcagcggcactgcagacccacgggatagacggaaatggagagctggatttctccacttttctgaccattatgcacatgcaaataaaacaagaagacccaaagaaagaaattcttctagccatgttgatggtggacaaggagaagaaaggttacgtcatggc

SEQ ID NO: 106 - DNA, 440 bp, Homo sapiens
ggtgtgcctggatgagtggtagcgtcggaaatgaggagcagaggcgcaaattttgcccagcgctctgtaccatggagaagtttgcttcctactgcctcactgaaccaggaagtgggagtgatgctgcctctcttctgacctccgctaagaaacagggagatcattacatcctcaatggctccaaggccttcatcagtggtgctggtgagtcagacatctatgtggtcatgtgccgaacaggaggaccaggccccaaggcatgctcatgcatagttgttgagaaggggacccctggcctcagctttggcaagaaggagaaaaaggtggggtggaactcccagccaacacgagctgtgatcttcgaagactgtgctgtccctgtggccaacagaattgggagcgaggggcagggcttcctcattgccgtgagaggactgaac

SEQ ID NO: 107 - DNA, 442 bp, Homo sapiens
  modified_base (397): a, t, c, g, other or unknown
gcacacctgtagtcctagctactcaggaggctgaggtatgagaatcgcttgaacttgggagccggagttacagtgagccaagattgcgccactgcactccagcctgggcgacagagcgagaccctgtctcaaaaaaaaaaaaaaagatgatgtaaacttcacagggcaaggtcttgttgtttgctcacctctgggttatgctcataaaacaagcttttgcccatgtaccctaagtcagacccaagaatggtgtctaccaatgattgtctcttgccacttaccgtacgcatacagaaagtgcgtgtggtaatcggcatacacaaagaagtcgtcccctttcttgtggtccagcacggaatggctgttctggaagtaatttaacacactcaaaatggtngcgttcgtgttatacggtgaaagaggggccaagcagatgtcttga

SEQ ID NO: 108 - DNA, 453 bp, Homo sapiens
gagactgcatagggctcggcgtggggggtattctactattttgtcagtgccctgggcataacagcaggagctcatcgtctgtggagccaccgctcttacaaagctcggctgcccctacggctctttctgatcattgccaacacaatggcattccagaatgatgtctatgaatgggctcgtgaccaccgtgcccaccacaagttttcagaaacacatgctgatcctcataattcccgacgtggctttttcttctctcacgtgggttggctgcttgtgcgcaaacacccagctgtcaaagagaaggggagtacgctagacttgtctgacctagaagctgagaaactggtgatgttccagaggaggtactacaaacctggcttgctgatgatgtgcttcatcctgcccacgcttgtgccctggtatttctggggtgaaacttttcaaaacagtgtg

SEQ ID NO: 109 - DNA, 421 bp, Homo sapiens
ttttttttgtgcagaaacattctgaactacaaagcggcctatttttgcttctggatatggaactccttggggatcagaatagaaagcttctagctcaaaaggcccccttctcagaaaggtgagaactttggagaaaggagcagcatggtttcgactaaagacttcatgaacaccttcagtatcttctgaatcatggttccagatcagagatattggaaaaggaactgcatctgtgacggaaaattctctaactttaaatgccggggaaagtattgcacactgtaatgcacatcctctggctactgcttcatctgcattgagtgttgtgctaatatcttttccaaagaatttggcaattctttccttcacagctggaattcgtgtagcgcctccatcaatctctactgcactcacatcttct

SEQ ID NO: 110 - DNA, 309 bp, Homo sapiens
ataagaatgcctgctagcaagggttccagcaaggtggttggttggtctgtaagtcagtcttgagtacttgaaacagttctgtgtttgttttttttccttagcgtttagaatagccatcattgtcctgcaataggcagagctatcacgtccaggaaaaatgagggagggaaccacagaggcagcgtgagatccaaatacagcattcaaaggtaattggtccagtggtgcctggggagggaggaagggtgatactccagggttagccgtcttcttttgggggtgtgtacagccgtttttttcgtggatctg

SEQ ID NO: 111 - DNA, 489 bp, Homo sapiens
ctactactactaaattcgcggccgcgtcgacgaagaagcaggtatttattttaataaaggaatggttggtattctagttaatcaagtaattcttttattagcaaggcagaaactagtgtttttctataaacttgaatgttaattgtacaggtgtattttacaatttttgtttaattaaaaaaatgttactatattaataatcaacctggtcaaaacctttcaggtttcttcgtttgagtcagtcgccttgattcagaatgtcacgagccttatgatatcatgctgaggcgccttgcaaatccgacaattaagatcctcctagaccttgaggtgatcagcataagaggccagatcccctcgagtcatctacacctagcttcaccttattctttaaagggcagaaaatttgagacggtgatcgccgtaacagtaaatttggcttacaattggggcacccctccggtttagaaagaggaacaccagattgac

SEQ ID NO: 112 - DNA, 563 bp, Homo sapiens
ggactcagaattgatgagagacatttacagcatgcacattttccttactgaaaggaaactcactgttggagatgtgtataagctgttgctacgatactacaatgaagaatgcagaaactgttccacccctggaccagacatcaagctttatccattcatataccatgctgtcgagtcctgtgcagagaccgctgaccattcagggcaaaggacagggacctgaggagccgagcgaatagcatctcctcccacctcccaccagagacgtcctgtttgagctgtcaggtgtaatatatgaattgacttaagttaatataaatgtgtacataatccacatttgtagtcaaggacgcaatctcttccacacatgtgcagttgtcagttggtacatctaaactccctccatcctgactcacgtggacttagatatgttttgtttctattttcttctatgtcagtttttcattctttgatgtttatgtcttttgtccatcagatctcttgtgatatcacatggaaggttgtgctcagcctgtcgggtctctttcttcctgcacatatat

SEQ ID NO: 113 - DNA, 587 bp, Homo sapiens
tttagccctgtggaattatcctcaattgcacatcagctggatgaggaggagaggatgagaatggcagaaggaggagttactagtgaagattatcgcacgtttttacagcagccttctggaaatatggatgacagtggttttttctctattcaggttataagcaatgccttgaaagtttggggtttagaactaatcctgttcaacagtccagagtatcagaggctcaggatcgatcctataaatgaaagatcatttatatgcaattataaggaacactggtttacagttagaaaattaggaaaacagtggtttaacttgaattctctcttgacgggtccagaattaatatcagatacatatcttgcacttttcttggctcaattacaacaggaaggttattctatatttgtcgttaagggtgatctgccagattgcgacgtgaccaactcctgcagatgattagggtcaacagatgcatcgaccaaaacttattggagaagaattagcacaactaaaagagcaaagagtccataagacagacctggaacgagtgttagaagcacatgatggctcaggaatgttagacg

SEQ ID NO: 114 - DNA, 222 bp, Homo sapiens
ttttgaatcaaaattaacatcaatatatagattctagtatattcttcttaaagcctttagaaaagataaaatgacattttgcaacatatgccaaacttcatgtttagtgtacacttctaattattggcatagagggatataactgttaaataacctgaaatgacaccatgcaatggtgaaactacagaagttggtgaaaagaagtatttacataatgtaata

SEQ ID NO: 115 - DNA, 512 bp, Homo sapiens
tttttcttgatatgcatagcttttcggggttggtattagacatggctttcgtaaataatgcaggtgtttttgtcatgtgtcactgctggctctgtggcttccaggtaagctggcggcagtaccttatctggtacctcaacaggtgttggctcttcagatgttagctcggtggacgtgacatcggtagaaggttctgcagtttcgggggaatgttccgccgacagttctgtctcctctacatctttgacttcaaactgtccaccctcttggtcatctgcatgctcttttttggactgcgggtgaactgacaccttgatggcaatttgctgaggttgctcgtgcagcgatgaggcgtccgagtcagcggcaggggagtcgctccgcttcagagagttggggattgtgtagacctcatccctgtctgcggcctcctggcctctggagtatgcctcaaaaattctgccccggtcctccagcccaaccacctcataatctcctccatgatagtcccg

SEQ ID NO: 116 - DNA, 566 bp, Homo sapiens
  modified_base (104): a, t, c, g, other or unknown
ttttttttttgttttttaaccccccccgagaagctctgtccccagctgatgcccatgttggaagaggctttgcggagaggagcccataccagcgcaaagctganctcctggtgctggccgtgctgtctgacggagctggcgaccacatcaggcagagactgctgcccccactgctgcagattgtgtgcaagggcctggaggacccctcgcaagttgtacgcaatgctgcgctgtttgccctgggccagttctcagaaaacctacagccccatatcagcagctattcaagggaggtaatgccactgctcctcgcctacttgaagtcggtgcctcttggacacacacaccacctagccaaggcctgctatgccctggagaattttgtggagaacctagggcccaaggtgcagccctaccttccggagcttatggaatgcatgctgcagcttctgaggaaccccagcagtccccgggccaaggagctggctgtgagcgccctgggagccattgctacggctgcccaggcctcgctgctgccctacttccctgccatcatggagcacctg

SEQ ID NO: 117 - DNA, 549 bp, Homo sapiens
ccctgtgcaatgtttagctctcaccccactcccaagtgccataattgaaataatactggtttggagaattagtacagattggtcataaatgccgcataaagtccgtagatccaggtaaaggtatttccaaatggcgtagtaatgcactgcagctgccgtggccacaaacaggtgccagatggcgtgggcaaatggaatgatgccatcactcttgaagaacacaactcccaagcaataaattaagcccccacaggcaagttcctgaagtccatcggtgttgttcattgatgtcaccaccaaggctggagagaatcccattgtgagatagaaaaagagttcaaccaccttatatttttcatggtagagaaatacataaatggttcctccagctgccatgagccagataaaccaacgcatatgagatgccaggggtccaagttcacgaagatttaaccatggagcataagaagcagcaatgaagaaatagataaccattctatcacacatgtgaaaacaatgctccactgtccttaagtggctctttttcca

SEQ ID NO: 118 - DNA, 416 bp, Homo sapiens
ccggggcacataaatagtatggcttagaagaaggcgtgggtacagatgtgcaggaatgctaggtgtggttggttgatgccgattgtaactattatgagtcctagttgacttgaagcggagaaggctacgattttttttgatgtcattttgtgtaagggcgcagactgctgcgaacagagtggtgatagcgcctaagcatagtgttagagtttggattagtgggctattttctgctagggggtggaagcggatgagtaagaagattcctgctacaactatagtgcttgagtggagtagggctgagactggggtggggccttctatggctgaggggagtcaggggtggagacctaattgggctgattttactgctgctgctaggaagaagcccaataagtgggtgaggcttggtttag

SEQ ID NO: 119 - DNA, 405 bp, Homo sapiens
cgggcctttacctgcgacgacctgttccgcttcaacaacattaacttggatccacttacagaaacttatgggattcctttctacctacaatacctcgcccactggccagagtatttcattgttgcagaggcacctggtggagaattaatgggttatattatgggtaaagcagaaggctcagtagctagggaagaatggcacgggcacgtcacagctctgtctgttgccccagaatttcgacgccttggtttggctgctaaacttatggagttactagaggagatttcagaaagaaagggtggattttttgtggatctctttgtaagagtatctaaccaagttgcagttaacatgtacaagcagttgggctacagtgtatataggacggtcatagagtactattcg

SEQ ID NO: 120 - DNA, 318 bp, Homo sapiens
cggacgcaagtacatccagacagacagcggcccctactgtgtgccctgctatgacaatacctttgccaacacctgtgctgagtgccagcagcttatcgggcatgactcgagggagctgttctatgaagaccgccatttccacgagggctgcttccgctgctgccgctgccagcgctcactagccgatgaacccttcacctgccaggacagtgagctgctctgcaatgactgctactgcagtgcgttttcctcgcagtgctccgcttgtggggagactgtcatgcctgggtcccggaaagctggaaatatggagggcca

SEQ ID NO: 121 - DNA, 460 bp, Homo sapiens
tttaatctaagaatttctttattttatgcataataaaagggactacaaagaacagctgaaaagccagaagacaaaggaacaaaaataaacaatgacgtgtattccaacccaaacaatgagaaatctatgcaactagactatcagttcaatctatttccaggtcgctatcctcactgtgacacgtggcagagttacgcacagatgtcagcaccaagacttccttttctgggagtaatccaaattcctggagaaaagcttcaaggtccacagcaaagaaatcatcccccagctggtcagtaacacgaacaaaattgccgatcaattcaccccccttatagatcagcagggcaggaagggcattcctggtgaactgactgctggcgccaataactgagctcttcaccttgcagaacttgacagctgggtactctgcggcaaggcagatcatgcaaccattcat

SEQ ID NO: 122 - DNA, 672 bp, Homo sapiens
  modified_base (474): a, t, c, g, other or unknown
atagagcctcacagctgccagctgttcccgggcccggaacgtctgggtcagtgaggtcccatctggcagcctgacctgtatgcgacactggtcatactcccgcttggtgggaggctcctggctgggagaagagggaacaggacctggctctggtgccactgggggtggctgagagcccacactgccaccatacttcttggctctctctgctttgtccctctcgatcttttctctaactctttgtctggctgctaactcctcggccttttccctccgcctctcctcagcagcccggcgcatctcatcttcctgtagccgctgtcgtgctgctgacaactcttgcccttgtctcctgcgctgccgttccccgttcaatgcctcccgttcctctctttcttcacgctcccgctgcttctggggccacagctccaacatcccctctagtttgttccgtctttcctcttcactcaaagnggggtttgccttctcccgcagccagaaacagattcttcaagggcgcctggtccttgaggaattggggtcccgtcccaagatatgtccaaggggaggttcaaaagggtctttcaaaatcgggttggtcttggtcttcaaaaaaccattccatgaaagcttgagtcccctgttcccttgaagggcaaaaactttctccgg

SEQ ID NO: 123 - DNA, 310 bp, Homo sapiens
gcacgagaaatatctgcctaagtgggacctgtgaaaacacgaaaggctcatttatctgccactgtgatatgggctactccggcaaaaaaggaaaaactggctgtacagacatcaatgaatgtgaaattggagcacacaactgtggcaaacatgctgtatgtaccaatacagcaggaagcttcaaatgtagctgcagtcccgggtggattggagatggcattaagtgcactgatctggacgaatgttccaatggaacccatatgtgcagccagcatgcagactgcaagaataccatgggatcttaccgctg

SEQ ID NO: 124 - DNA, 302 bp, Homo sapiens
  modified_base (93): a, t, c, g, other or unknown
gcagagctggacctccagacccggatgagtctgcggtccttctggaggccatcgggcagtgcaccagaaccgattcatccggcagagcggcanagcagcagcagcaacaacaacggagtgaagagctgctagcagagagaaagcctgggcctctggaggcgggaagcggagacccagccctggggagatgcgggatcagagccccaagggaagagagtcaagagaagagagactaagtccgagggagaccagagagaggaggctggggatagggggagcccaagagttgagcctgaggcctc

SEQ ID NO: 125 - DNA, 811 bp, Homo sapiens
tttgaggtttgtaagaattttttaaacaaaacagaaatcacagtgaccaagggtaatgcgagtctgtgtcttccttgcccatgctgctccccacagctctcggtgggtactaaatgacgcgccactgcatgatgcttgtgtctttcccgcccgtggagatgaggtggctgtcttcacagaggaaatcgacattggtgacatggctgctgtgcccgccgtagatgtggcttggagccctgaactgcgagcaggggtatgagaagaggtgcactttgccaaagtcgtcgcctgttgacaggagtttcttctcatgggcccgacagacggcatttatgttggttccgtccgagccttctgggcacactccaaaaaaatggaatcccaaagtggaggtataggtaggccattcaatgtctcttgtagtttccacacttacgacttgcttacaggcagagggaacccagtagaggatttcgtagtctccggaatttgacacgaggaactgtgagtttacagaccagtccaggtgagtaatgaagctggaatgacccgagcacttgcccactcgcgtgtacttcctcccgtttgtactaaaggcatatatatagatgcagttgtcctgtgagcctatggtaaagaaatttcccatctggtgagtattgcattacagagaagccgacggttccatcctgtgtgaagggggaccaagtcttttgtttttcgtgttaaaaacaacccacctcccagttagtggttcgacttcaacccacgacccttgagggatgaaaccaagagaactggccggtttctc

SEQ ID NO: 126 - DNA, 456 bp, Homo sapiens
tttttttttttaaaatacaaaaaacagctttactcagactttttgactgccatgtcctcctttagaaggactacagtttggctacttggtctcttctggggcagatgtggcatcctgaggtgtgttagcttctgccggtgcagatacagctcctaccacagtaggggtggtctcagataaagcagggatggcttctggagtggaagtggctcctgtctcactgggggtggtgtcagtttgaaaggctggagtttcttgacggcagctggtgtctgttggactgggtatgatgtcagcttgaacagtcatggcctcttcttctgtttccaattctgtttcttgattttgaacttcctcaccctcttctaccatagcaggtggtagttgtaataaagtctgatgataatgatgtgtagtctgtatcaaatgcatgtacatgttgtatacaaagtttgc

SEQ ID NO: 127 - DNA, 292 bp, Homo sapiens
ttccgactcttttcacatgtttttcgatagcactgccattttggctggactggcagcttctgttatttcaaaatggagagataatgatgctttctcctatgggtatgttagagcggaagttctggctggctttgtcaatggcctatttttgatcttcactgctttttttattttctcagaaggagttgagagagcattagcccctccagatgtccaccatgagagactgcttcttgtttccattcttggggttgtggtaaacctaataggaatatttgttttcaaaaatgga

SEQ ID NO: 128 - DNA, 433 bp, Homo sapiens
  modified_base (154): a, t, c, g, other or unknown
  modified_base (278): a, t, c, g, other or unknown
  modified_base (338): a, t, c, g, other or unknown
  modified_base (398): a, t, c, g, other or unknown
gtaatttcatagttattttaataaccaggtttacattaacagtcacgtgatgaacttttttctttaatgtcagctaaactcaaaacacagttttgttcacggttcaaaccaaacagctcttcacgttccagagctgcctcacagctagcacagntcacaggagattactgtctgtccatacccaccagacacagaactgaacacccacacaccagttttcaaagagggaacttacaatgaatgctggctgcccagggcacccatgagtgtatctgggnctcaagctggagttttccaggggagaaagcctgggaagcttggtggcaaggaagttgggnattgcccaccctactgggaaaggggtttctcaggggttgagtgaaaatcccgggttaggngtcagccctttgtgggaaacatgggcactttcagt

SEQ ID NO: 129 - DNA, 372 bp, Homo sapiens
  modified_base (32): a, t, c, g, other or unknown
  modified_base (72): a, t, c, g, other or unknown
  modified_base (83): a, t, c, g, other or unknown
  modified_base (101): a, t, c, g, other or unknown
gatccaggagccacacagctgccatggttcanaaggccctggaaaccgacccaggagatgccgtggttgtcncgctttgcganttgctgattctaactatnaagccatttgtaaggtacctcgaaaggtggccagaagtatctcctgcggcccttctagcaggtggtcgaccagcatttgcactgaagaaccagcgttgtctgaggttgggccacccgacttagcaagcacaaaggtacccccagatggagaaagcatggaggaagagacgcctggttcctctgtgggaatctttggatgcaagcttccaggctagccctccacaacaggaagatgaggagactgagagaagtgcaaaggaacttggaaagt

SEQ ID NO: 130 - DNA, 528 bp, Homo sapiens
  modified_base (101): a, t, c, g, other or unknown
  modified_base (411): a, t, c, g, other or unknown
  modified_base (429): a, t, c, g, other or unknown
  modified_base (460): a, t, c, g, other or unknown
  modified_base (471): a, t, c, g, other or unknown
  modified_base (489): a, t, c, g, other or unknown
  modified_base (517): a, t, c, g, other or unknown
gagcggagccggagcggaagccgcagccgggcggcgggagcggcgggagcgggggaagcagggcgggccgggctccatggcgccagcggcgtccgcctgancagcgcgggcaacagcggcggcgtcggccggatcgggccgcgacacctcctggccatgggggacgtgctgtccacgcacctggacgacgcccggcgccagcacatcgcagaaaaaaccgggaagatcctgacggagttcctccagttctatgaagaccagtatggcgtggctctcttcaacagcatgcgccatgagattgagggcacggggctgccgcaggcccagctgctctggcgcaaggtgccactggacgagcgcatcgtcttctcggggaacctcttccagcaccaggaggacagtaagaagtgnagaaaccgcttcagcctnttgccccacaactacgggctggtgctctacnaaaacaaagcnggtctatgagcggaggtnccaccacgagccgtcatcaacagtgcangctacaaaatc

SEQ ID NO: 131 - DNA, 521 bp, Homo sapiens
  modified_base (387): a, t, c, g, other or unknown
  modified_base (440): a, t, c, g, other or unknown
agaggaaattgattagctatggtgtaagttttcgggagagtcatctgaatgttgttatatccataagcaatagctgcatcttctacaatatcacatgcatggataatgtcagctctggttggagggatttcaatctcaatctgattcccatcacctatgacttctgattttaaatacatcctggtcagaagtttggcaagattttctggagtttctctgattccaacttttttgttaattaggtcagctctcaccatctcctttcggtaagctaattctggaaaggtatgtgattttccattaggaaaaaccacttcagcagcttcgaccgtaaattgattctcacaatattcactgaacatggtgacaataatatcaagaactatntttgccttagtaaagtcagttcccgtgcattcaataaaaatatttctagtatntactgttattctggaatgatccccattgatgatgggaggcattgaaaagacgacaccattgctatcatagataactggata

SEQ ID NO: 132 - DNA, 429 bp, Homo sapiens
gagggggagacggggagcagatgcctcaaagggggtcaaagagaggggaaggaaattgcacataaataaaccggatgattccaaatgcaaggagtcctcagagcggagcgcggacggcttttccggagtcctgggtctgcatctggcgccttggcccctgctcactcgcgctctcctcctcctccttctcctcctcctcactgcttgagctccagggcccagacgtgctgcggccagcccgtccggcctttggttttcttgtcgttgctgctcactgtgcttttcaagatttcgttctggacagaggaaaggcgagggcgagaaaagtggaaagagaaattcagagaggatacctggttccacaccaacccggagcttcctgcgccggaggagacagtgaaccagagaggaaaggatacgatgggggag

SEQ ID NO: 133 - DNA, 442 bp, Homo sapiens
tcaaacaataacttggtattttatacttctctatactttgtagcaaatctttttttgctgaatttaatttataataaactttttaaattacatctctctctcttttttttttaaaatcaaggctcttttatgtcaaaatctttttttagctatattttagattaacatttaacatcccccccttgtgatctataccgttggatattcaggtattactgtgtgtgtaacagctaaaacaagagggaggagggaaaataaaggcagtgaacttggacggatgcatcaacaacagcagataaagctaacccctcagtgaccatagcagcatgtcttctggaagcctttactcttaccccagagatttcctcagccccttccctctctccctcctatcctccaaacacaaagccaacagtctgtcctttcgcttttcttgaggaga

SEQ ID NO: 134 - DNA, 913 bp, Homo sapiens
  modified_base (317)..(318): a, t, c, g, other or unknown
tttttttcgattccctctcatttattccttgtggaaaaagaaaaacacaaatcttaaaaactaaagcaagtcagggaagcctggaaagatacccagatttgataacatgttagaaggaaatccaggctaaggaatctcattttctagctttgatctggttgtcagttgggatggacttgcccaagtgatggcccacagaaaggccaaatttcttgtttttctcctcatcctgtacctcttttttcattaagaatcctgcctggaagtttaggtcaaagaggctgcttggagcaaaatacagtggtgtctcattcccnnaaatatttttccttcccccccccaggcgtttcttcatccttcaggatttgaattcgggcgtctgctggagtggcccaatgctatatgtcagttgaggttctaagacttggaagccacagaaatgcagaatgccactctgaattggccagagaatgacattcatgtccccgtggatcccttgcagagagtacatggagccactgccaccagtggtgatggaaagcactgccttcttactccggaagggtcctttgtcatacatggcagcgtaagtgtaagcaaactcttctatgaacactcgctcaaaccagcctttcagaatggcagggactcccaaaccactgcaggggggactgggatatcacaaaggtctgcggctttccagcttctttttggtcagccacaaatatctgggctcagatgggctttctttattaagcagaacaagattcgcaggatactggaaagtcccagggtcctttcagtttacttggaagggccttttgggaaagaagggatggaaattatgggataaaggggccgattccacaacttccttccttttttttaaagccggtgggcaagctccttatgg

SEQ ID NO: 135 - DNA, 750 bp, Homo sapiens
  modified_base (416): a, t, c, g, other or unknown
  modified_base (605): a, t, c, g, other or unknown
ttttttttttttgtcattcatagtaaaagtttattgaacagaaaacccagcaaaggttttcacctccgcaaagttccccttagtttaaagtaaagcactgcattttaaaaagcaattatacataagtctttcctagaaaagtcctgctaaaacatgtctagcaatttcattgattatataaagtagtacacttagtgtaatttaaacattccaacaggaatcaaatcgtaccagcagaaccacttctgcatctatgacttctatgtacaaacacacatgcagacacacacatttggaaaagttcctcaagcatagacatgcaacacctaaggccttctacgtacagtgcttattaaactacatagagtatatattaaagctcttcagaataaagacatgagaagccttgggcattntttgttcaccaatttgtatcacggcttcacgtttctgcttttgcttgctcacaaaagcatatcatcatccacactgttttttaaaaactcatcattgccatgtccaggagaggcaatctagctggagtcaggtgatccagtccattcctgtcaaagcctccaacagctacagcacaaacaccatcagtntgcgatggctggggggccttctggaagaagagaggcaaagaaagtcttgaagacaagccatgctgtgctcataaaggaggggctggtctgctcgccatctagtacatccctgtcttggagggaggtgggttggggtttccatttc

SEQ ID NO: 136 - DNA, 348 bp, Homo sapiens
aaaacgacggccagtgaattgtaatacgactcactatagggcgaattgggccctctagatgcatgctcgagcggccgccagtgtgatggatatctgcagaattcggcttttgacaccagaccaactggtaatggtagcgactggcgctcagctggaattccggctgggactaccgggtctcactccagaagaggcttcttcagagcatggtagtcttggggttctaagagaatgagagtagaagctgcaaaacctcttgaaactggggcttgggagtcacacatgactttctccacattctgttcgtcaaaagcgaatcataaggacagcacagactcaagggataag

SEQ ID NO: 137 - DNA, 505 bp, Homo sapiens
aaacgacggccagtgaattgtaatacgactcactatagggcgaattgggccctctagatgcatgctcgagcggccgccagtgtgatggatatctgcagaattcggcttttkacaccagaccaactggtaatggtagcgaccggttctcagctggaattccggattggtccaattgggtatgaggagttcagttatatgtttgggattttttaggtagtgggtgttgagcttgaacgctttcttaattggtggctgcttttaggcctactatgggtgttaaattttttactctctctacaaggttttttcctagtgtccaaagagctgttcctctcttggactaacagttaaatttacaaggggatttagagggttctgtggggcaaatttaaagttgaactaagattctatcttggacaaccagctatcaccaggctcggtaggtttgttgcctctwcctataaatcttcccactatttttbtacatagacgggtgttctctttt

SEQ ID NO: 138 - DNA, 513 bp, Homo sapiens
agggccgagtggaggtgctggtggagagaaacgggtcccttgtgtgggggatggtgtgtggccaaaactggggcatcgtggaggccatggtggtctgccgccagctgggcctgggattcgccagcaacgccttccaggagacctggtattggcacggagatgtcaacagcaacaaagtggtcatgagtggagtgaagtgctcgggaacggagctgtccctggcgcactgccgccacgacggggaggacgtggcctgcccccagggcggagtgcagtacggggccggagttgcctgctcagaaaccgcccctgacctggtcctcaatgcggagatggtgcagcagaccacctacctggaggaccggcccatgttcctgctgcagtgtgccatggaggagaactgcctctcggcctcagccgcgcagactgaccccaccacgggctaccgccggctcctgcgcttctcctcccagatccacaacaatggccagtccgacttccggcccaagaacg

SEQ ID NO: 139 - DNA, 340 bp, Homo sapiens
tttttttttttttttgaaatgagtaaatttatagctttatttgcatacagaaaagtgcatgagaaaataagtatgtacaaaacagttgtgtggctgatcatgactttcaaaaattcaactacctagaaatagttacctccagtttagcacatttaggtatttggacatttaaagtactatttcaagtctgtgtttatagtgactgagtaggaagctgatagaaaattatgccatatatgatcaactattaccattaaacataaaaccacaggactttctacttggggctaatcaatagagggtcatgtggcccctgtcttgtttagcttctgagcatcac

SEQ ID NO: 140 - DNA, 334 bp, Homo sapiens
ggccttttggttccagaaaaatagaggggatctctgtggagcctctttggtttttcatcaattctggggctattaaaactagccattcatctaacgagggccaaagcaattccagaggcttgaacacctggctttttggagttttattcccattgtagcccatatcaattccattactgggggaggatggaccaattcgaaagacgtgacaaaacattctcacaatccttaaaaggctcttcatttgagcatcataattgctagagaggctaagcagtttatgaccatttgttgtagcaacttcagcaaggcttgttagaatctttaggtactg

SEQ ID NO: 141 - DNA, 497 bp, Homo sapiens
tttaaggttacacgattatttattgagagcctcctctccccgcccttgcaatctctaggtcactttctccgcttgtagattttgcgcgcaagccccagaaagacggctgggggcaggggtgctgcgtactgttcaatgagagccataatgtggctgtaactgtcttcctcatattgcaagaacactgctggcagatccagctcctcatatagcgccttcacccgggccactttctcagcctccttctgcccgtaattttccttcaggatctggtactgttctggagtggcccgttgcagacactgaaccaccagccagctgcatttgttgtcctggatgtcagtgccaattttgccggtcacactggggtccccaaagaggtcaaggtaatcatcctgaatctgaaagaactcccccatctccagcaggatcttcttggcattggcgtgctccttctcgccatcaattcctgccatgtacatggctgcagctatagg

SEQ ID NO: 142 - DNA, 353 bp, Homo sapiens
ttttttttttttttagagattgttgtgacttttattcaatttgaaatccggattaaaataaaagcagtgagagcaaagctttacaaatattacattactacgtcattgatatggcttttacactgattggatacaggaaaaaaaaaaacctaacattagaattaaggcagtaacaacatgtgcaaacccagcacaccccctgacagtcttcagtagaaaactactctggtcaggtggtatctgacatggctgcatgcaggtctcattgcatggaaggataggtcctgaagagcttcattccttaaaggggaaaaggacccttctcactggccaacgatggccaggagcagctt

SEQ ID NO: 143 - DNA, 559 bp, Homo sapiens
  modified_base (532): a, t, c, g, other or unknown
atgcttcacacttggtttgcttatattgatcatttaaaaagagatattaatcttacctattgccatgaatatttcatttacattcattgatgttttagcggatgtctccatgaataataaactattgtcatctgcataggactgtgcttcctggaaatctactgctcttttatttgctaggtcggccttgtttcccgataaagctattacaatgttaggacttgcttgcctctgaagttctttaacccaattttttgctcttgcaaaggactcctcatttgtgatatcatatacaactatggctgcttgtgctcctctgtagtacattggtgctaggctatggtatcgttcttgaccagctgtatcccatatttcaaactttactgtagtgtcatcaagacatacagtttgggttagaaaagcagccccaatggtactctcttgaaatcatgacattggctttcacaaaacaagcactaggcttgatttgcaacagcggactctcccagagtactagtttgaactgcatatntatttccagtattggccccgtgggtct

SEQ ID NO: 144 - DNA, 572 bp, Homo sapiens
ttttttttccttttaaatgcttcttttatttcattggttgtacattgggtgagtgaactgaatattacaaccaaaacatagtattgatacaaattagactcctgtttacactgtaaggtaatgaatgagggaattctttaagtgttacagaaagatttagtagaaatgttaccagtggtatggctgaaagaatatttcggtgaagtgctgttatatcctgaaaaccaagagtgaaatgtagttcccatacaagtggagagttagtctcttaactacagtatttgttgaactgatatcttcatgtcttggatattggtgatttttgttttttaattaaacaaagcatttaagatttattcatcatagtcagacttctgaatataaacaaacttttggcaaataatatttatacagaaaaatagttttagatcctctcaaatcccagaattattctataaaattacattataaataaataaaaagcaaaatctgttgtacatatatttgtacatctatgcatttgccttgcctcctccttattgtaaatggcatatttatgactctttgcatat

SEQ ID NO: 145 - DNA, 402 bp, Homo sapiens
ttttttttttttttttgtcttaaggaagttttttggcattctttttttttttagattacaacacacatacaataagtgaattttatcaaaatacagcacatttcttctactatatccataaaaatcaattcctatgtaaatagtactgaaaatcaactaaaatgagttaaaatttacaaagagttgttaaagggtttcaatcaaaattattaaaactatacagtacaataaccaattgataacatcttgaaagaagtgcaatatttgagttcacatatttttaaaagtgctgcctacttactctgactagcaagaatggaaagtgagtccaactcacttttgcaaaaataatgttggttggtgttttaagctagtcttataaaagtcttaattaaaatcaag

SEQ ID NO: 146 - DNA, 482 bp, Homo sapiens
  modified_base (403): a, t, c, g, other or unknown
agtagaaacaaagtatgtttaatggttgctttggaaaggggaagtgggcacctcatgccagggagatttaaaaatgagacttttcaagcaagcactgcctatagcatagtctcatattttgaaaatttaaacctaattttaattatatataaagaactattttaaaaaatcacacccacaagtaaaaaactggtaatctgtttacaaagtgcagcgtcagtacagcaaactcatctcaacaaaagattatgtgtggtttctcgggctttaaaactcccctggtttccatttaaatgctttaacattgagtcatcctgcatacatgaaaagcctgtgtaatgaagcctgggtcctttaacacctgctattaattaattccaacataagtgagtatgagacctgngaagtaaattgtcatcatctgattgatgaggtacagattatctgaataaaatttctgacctggttatgagtcagtaatc

SEQ ID NO: 147 - DNA, 489 bp, Homo sapiens
  modified_base (392): a, t, c, g, other or unknown
ttttttttaacattcctaagtttctttattcttcatagttttctaatgaacaaatagttagttttcctgagtaagattataaaaaagttaaccattcttccaaaagtataaagacaaataaaatgtcgactcataatacaaattttttacatagcattaaaggtgcagatattgactgcccctcttcattatgattggcccaccccttaaaaagactgcaacagaggattcaattgtctaaaatacttcgaagtacagaaattaaatgctttagcccataaacatatccctcatctattgtgttgctagggaacacatgagcaaaatctatcattcgcacttctacttcagcaatctcttggcaaccagtgggaagatggtagaaaactttntccagttgggaaagtacatttccatttaaatgttcctgtgacatgcttttccacccattgtcttgctccagattttcaactttcaatgaagtctgac

SEQ ID NO: 148 - DNA, 372 bp, Homo sapiens
  modified_base (247): a, t, c, g, other or unknown
  modified_base (255): a, t, c, g, other or unknown
  modified_base (257)..(259): a, t, c, g, other or unknown
  modified_base (262)..(266): a, t, c, g, other or unknown
  modified_base (271)..(272): a, t, c, g, other or unknown
  modified_base (279): a, t, c, g, other or unknown
  modified_base (291)..(292): a, t, c, g, other or unknown
  modified_base (295): a, t, c, g, other or unknown
tttcaccttttaattttatattatttgcgtcatacatttcctgtaacggaagtgttaattttactgtactttttggtaccttttgggaatctaatgtattgtaaggtattttacacgtgtcctgattttgccacaacctggatattgaagctatccaagcttttgaaataaaatttaaaaacccccaagcctgggtgagtgtgggatatgctgtgtgagacctcttgctcagggtcgagggaggcgngggggggngnnnccnnnnnccctnnacttttnccttcttctgcnncangctcttccagcttgaggcccagttggggggtatcctttaaggactgccttgcctagggctgggcccccctttcaaga

SEQ ID NO: 149 - DNA, 491 bp, Homo sapiens
gtttttaaaacaagcaaattttattaaaggaaaattttgcaggtttaaggtttgcaggtgaaattttgtaggtgaaaaggtttacttttcaccagtctgttctggcatgcttctaatgatgtcagagtcacctggatcaatgatagccagtgtgcacactctgtagtattttccgcatgctgtgcccagttcaatattattgccactgtagtgatggacaccagttttagccaacatagcatagtactctatttcagatttcctcaaagctgggcagttgttagcgagaatgaccaatttcgctttgccttgtctgatcatcttcagagtctgcttgtaccccaggacgtacttcccacttttcataacgagttggagcctagagttgatcgactccagcgactttttcgtcttctttgcggccaccatcttcctgccttaggagcgggacggcccccaacctagaagagacagagaacaggacaggaatt

SEQ ID NO: 150 - DNA, 455 bp, Homo sapiens
catgtttaatttattattattgcaaaagaacagtttttctcatgattagtgaaatagaaaactcacaatatacttaagagtctgcaacaagttacatagaatcagaggcacttcaaaggcttaaaaagacgtttacaacttaaatgcatttttaagaacaaaaactgatttttctttaaacctctactcgtaccttcaaattgcaagaaattaacaaatacagtggccaaaggaatctgcagcaacttcttaaaatactgttaacatctttgggtttgctgaggcttgtcagtaacttacatcaaatcctcccaaaagaagatctgattagatagatatgactaaacggttttgtagtaataatccaattttacacattaatttgctgttgcaaatctgcccaaagctacaggtaatgaaaaataaagcaagtgtaaaatggatagtctgacact

SEQ ID NO: 151 - DNA, 465 bp, Homo sapiens
agcttgtcgacgctgtcgcaggggtggatcctgagctgccgaagccgccgtcctgctctcccgcgtgggcttctctaattccattgttttttttagattctctcgggcctagccgtccttggaacccgatattcgggctgggcggttccgcggcctgggcctaggggcttaacagtagcaacagaagcggcggcggcggcagcagcagcagcagcagcagcaatctcttcccgaacacgagcaccacaggcgcccgaaggccggaacaggcgtttagagaaaatggcagacgatattgatattgaagcaatgcttgaggctccttacaagaaggtgagaaaaaacatgtcggtgaggtttatatatttcttaatttagcattattcacgaaactactgctgaaatgtaaactaaccttcccggagccctcttgatttatcctattagagatgccttaccttgtac

SEQ ID NO: 152 - DNA, 386 bp, Homo sapiens
  modified_base (374): a, t, c, g, other or unknown
tccttcttagttttcttcccaaatggttcctcagccccagtgctgggccctgaaataggcccagctccctgtatagttcccacagagctggccacaccataagtcaggggcaaactggaactgtgggaaggagctgcagcctgtacttccccttcagttagagcctgaagctggaggagcttctttagcaagtaccttctttcttcttttgctttaagaaatttttcctcaagacgagcaatttcatcacaaatagcagcattttcaaacaccgtggccttggccgctttgcgcagccgcaggtacttcagccggtacttctcattctggctcttcttcgggagctttttcatcctggccttgctggactgcancggagcccgcgg

SEQ ID NO: 153 - DNA, 601 bp, Homo sapiens
  modified_base (547): a, t, c, g, other or unknown
tttttttattggcttggtttttatttctatgcttataaaaaaaatatgaagcttctttgtgtggactgaaggggtgttagcctgtggatgttggtcttcggtgcctgtaccccagtggctgtttacattccaggcccctgctaaataaagcaggctccactgccagctgtctgtacactttttcttgggggaagagttcttgtcttcagtttactgcagtagggttcctggctctgttacatgctcatgtgttccggaagaacatatgaaatatcatcccacggatgacgatacagcccctgcttcagcctcttctgatcaagatagtgtccaatgaaccccatactccttcccagcacaaagatgccattgagggctccaatgtcaatatattcatcagcttcctcccgagtaaaggacccacagtttctaagcatgtctacaaatgcgactccgatgagaccatctacattcaggataagatttggcttcttcgaggtgtaatcttctctacttccagtgcataaatcgagcagagagtggccanggagtgctgccctgcgtaatcttttgagatctgcactcgcatgttctgggtgtt

SEQ ID NO: 154 - DNA, 340 bp, Homo sapiens
gcgttttcatactctttattgccaacggtttaaaatggtcaacataaaaaaaaaagacattttgataataaatactgctctttgggctgtaataaataaaaagtttattaacaaggaatgcacttttccagccacaagtatcttcaaaaattaatgaaaaaaaattatatatggccatagttcacagttacgcagccaaaagctgctccaattacagcctttaaacaacatgggagcttcctcccttctccctccccttcaggaagtatattcacagttccaaagtcctctggctgaaatgctctcaacagagagaatttaagaatcaatgcacctttct

SEQ ID NO: 155 - DNA, 759 bp, Homo sapiens
  modified_base (504): a, t, c, g, other or unknown
  modified_base (555): a, t, c, g, other or unknown
  modified_base (595): a, t, c, g, other or unknown
  modified_base (613): a, t, c, g, other or unknown
  modified_base (626): a, t, c, g, other or unknown
  modified_base (728)..(729): a, t, c, g, other or unknown
  modified_base (746): a, t, c, g, other or unknown
cctggtcctactttcccctcctcatcttcctttttctcactgtctgacttttcctcactgtcggacttctgttgctttttggtttcagacttctcatctttctttaagtctgcttttggtcctttgtattcatgtgtgtacagaggcctgaaggagtcaatgaagcccacatcagcagtcagatttggcaagaaccaaaagtggtgccttcctccagttatgagccaaatgatgagaaatagaatgcatcgagcaacagcaaggagaagaatactggctacaaaacagcctgcacccacactgaggtaataaacacctactctcatttctgctggccaaagggggaagagggtggccgctattactgcaatcacaagaattaatcccatgacaaatgttttaaagtgaactgggtcatagatccatacatacacctcatttccatccagaaaaacctgatcatcatgtggctaagtttgaattttttctagtttccttcttttntagagttccctgagtttcctcctttttgattcttcttttcaccatcttttntttctctttttctttttttggctctcatcccttatatttncttcttgctcttttatcntctcttttcactntcagctttcccttatctttttctttcctatgcttatcatattcattccatactttagggggctgtgaaaaactgctctaaaaactctgtgagtcaccacaanntcccctgtgaataagtnctctcttctgctt

SEQ ID NO: 156 - DNA, 703 bp, Homo sapiens
  modified_base (493): a, t, c, g, other or unknown
  modified_base (641): a, t, c, g, other or unknown
  modified_base (655): a, t, c, g, other or unknown
tttttgagaatacacagggagctttattatacaaaatggcggggtggggggcggcaagcagcggatggcatcaaagaggcgagggtaggtcatgctggcaacaggaagcaacttcttagccagggccggggggcgggtgtctggctggaatctcccctgggtacatggagggtgccagccggctggacctgcagacccaggaagcgagatgggacgcctagggagccgggcccccttccacaagcaccttctcatacttcccatgcccggtggccacaaacttatacctcttcccagatggggtgctcttaattgttgatgaggtcttggagcctcccttctgctcccagaggcttttcttgctcatgtctccagccacaatatccttgcaggacggagtcttggccgcagactgagcctgtacctcacccgtctcccaccgactcttggtactggccacagccatgctgggcagctctatggaggcctggcngggctagcttggggtccggcccagcgtctcgaatggcctggtgtattgttccagccactgatcaatcctggagatgggcaagtcttgcctggatttcttcacactggtactcttctttattggagcgtttaggggactcgtcctgtcnatgaagttggtgtnggctccagggaagcgagctctggtcgatgtcccttcaaaaccaagggg

SEQ ID NO: 157 - DNA, 757 bp, Homo sapiens
  modified_base (543): a, t, c, g, other or unknown
  modified_base (650): a, t, c, g, other or unknown
  modified_base (659): a, t, c, g, other or unknown
  modified_base (734): a, t, c, g, other or unknown
  modified_base (741): a, t, c, g, other or unknown
  modified_base (745): a, t, c, g, other or unknown
cttggtgtgtccgctttagaaggtcaaacttctcgtgaagctctttctctgcctccttaagttcagcttctttctccttcactctcataacaaacatttgtctcatttcttcttctttcttctgcagttctcccaggaattcattcctttttgcttcatatgtctcctgaagactgaagggtttgctgtcagggtcagtgtccttgaaccccatctcttcaagcttacagcgtcggtacaattcatagtggcgggtgtgagtctgctctcgcaagtcctccatgttcacgcggatcagcatctctcgaagtttcacaaaatcgcaatgattttcattctcaacctgcaccacaccccaggggtactgcctggcctttgccatcttgttgccaatcttcacctcttcggtgctgccaaccactgcaaatgggagatggacactcattgttgcgttaatctctgccaccgtttcttcatcagtgggaaactgatatatctggaccccattgctgaccagttcactcatgatcttactcttgaatntgtgcagttcattcttggcaatgtgtcagcttttgcaaatattgggaatgatgtcaccttactgtccagctttttcatggtgaccagatcccagggaccttagtgantgtcagtanggggcaataagtagaggcaaggcatgaatcctcgtgtcatggtagtttgagaagagaccgttaaatctcattttnctctgcngtangccctcgaactg

SEQ ID NO: 158 - DNA, 455 bp, Homo sapiens
ggaagtaaaaaaacctgtttcaggcttcatttattgctacataatgactacttcaagggtcatctggcccgtcgtcagtcactcttagaagtggtaaatacagtggtatagtttggaaggaaaggaggaaaaaaataatgcattgtgatacaaaaatattacctacatataaattattaaagatttataaaacattcagaatatgttcttgctataaaaacaatatacttaaatatagaagcaaaaagtcctgaagcacccgcaattattttaatatccatttaatcagggaaaactatatatgtggatatataatacatacatatgtaataatttgagaagaaaaaaggcaaaattctgattataatccaaaaagagtttatctaattatggaggtaggtctccactccaattatacaaataagttatcagttttattcaaagaattataagtc

SEQ ID NO: 159 - DNA, 486 bp, Homo sapiens
tggttttcttcagccgcagtcttgtctgctctgaagaaaattcttgcactgctcagtgagaaatacagcaattcaaattcctgtagatagacatccagtcgcttctgagtgagattcatggtttgtaagagtttttcatcttgactggctgactgtacattctgttgcttagcaactgctcttatctccttcaggtatttctctctaacagactggaaccagtgaagtgaatcaaactcccgatactgatccaaaagctttagaatgtaagccacacccatggcaaagccatcatcagtaaaggcagctccaattttattttttttatttaatttttccttgcaactaatggaatgctctacaaagttgagggtcagagggggaacaattatatagaaatttcggagatgtatattctttggccttcgaaattctggagcaaaaacgtctacaagcattttgaaatattctgtgccttcggcagaa

SEQ ID NO: 160 - DNA, 638 bp, Homo sapiens
ggggctcctcttcactttctttatcttcatcatctgaagactcttccttgtttttcttttcatcttcatcactactagattcatctgacagaatttcaggacatttggttcgcttagccttacttgccattccagaactgttccggtcctttttactgcctttgctacaagactttttaaatttcggcaatggtttgccagaacgctttggatgcattaagaaattcaagatcctcttcactagttcactatttacacctgatctctccaaatcaagaacctcacagatgctctttaacatggcatttctaaactttttcaacatttcttccttctttttatattggacacttcctttttcaaatggaaagccactgaactgacccacattcttctttaatgaggacacacagcctggcctgttgtaaagcactttgtgtacatatctaagatcatccgttttcttcttacttagaaaaacatgtatgctctcaatttcacaaagcgtctgccgctttccttgctgcattgtaaattgctctctctgcagggagagacgtgcattggcacctctctactttttcttttccctcttgccttcccgaaagaacctttttttttcttcctcctcttctctc

SEQ ID NO: 161 - DNA, 845 bp, Homo sapiens
  modified_base (362): a, t, c, g, other or unknown
  modified_base (418): a, t, c, g, other or unknown
  modified_base (458): a, t, c, g, other or unknown
  modified_base (477): a, t, c, g, other or unknown
  modified_base (480): a, t, c, g, other or unknown
  modified_base (484): a, t, c, g, other or unknown
  modified_base (502): a, t, c, g, other or unknown
  modified_base (508): a, t, c, g, other or unknown
  modified_base (513): a, t, c, g, other or unknown
  modified_base (530): a, t, c, g, other or unknown
  modified_base (548)..(549): a, t, c, g, other or unknown
  modified_base (556)..(557): a, t, c, g, other or unknown
  modified_base (559): a, t, c, g, other or unknown
  modified_base (570)..(571): a, t, c, g, other or unknown
  modified_base (575): a, t, c, g, other or unknown
  modified_base (580): a, t, c, g, other or unknown
  modified_base (584): a, t, c, g, other or unknown
  modified_base (586)..(588): a, t, c, g, other or unknown
  modified_base (591)..(592): a, t, c, g, other or unknown
  modified_base (600): a, t, c, g, other or unknown
  modified_base (602): a, t, c, g, other or unknown
  modified_base (610): a, t, c, g, other or unknown
  modified_base (614): a, t, c, g, other or unknown
  modified_base (619): a, t, c, g, other or unknown
  modified_base (621): a, t, c, g, other or unknown
  modified_base (634): a, t, c, g, other or unknown
  modified_base (637): a, t, c, g, other or unknown
  modified_base (653): a, t, c, g, other or unknown
  modified_base (663): a, t, c, g, other or unknown
  modified_base (664): a, t, c, g, other or unknown
  modified_base (668): a, t, c, g, other or unknown
  modified_base (670): a, t, c, g, other or unknown
  modified_base (674)..(675): a, t, c, g, other or unknown
  modified_base (679): a, t, c, g, other or unknown
  modified_base (686): a, t, c, g, other or unknown
  modified_base (696): a, t, c, g, other or unknown
  modified_base (699)..(700): a, t, c, g, other or unknown
  modified_base (703): a, t, c, g, other or unknown
  modified_base (708): a, t, c, g, other or unknown
  modified_base (719): a, t, c, g, other or unknown
  modified_base (725): a, t, c, g, other or unknown
  modified_base (735): a, t, c, g, other or unknown
  modified_base (742)..(743): a, t, c, g, other or unknown
  modified_base (752): a, t, c, g, other or unknown
  modified_base (754): a, t, c, g, other or unknown
  modified_base (760): a, t, c, g, other or unknown
  modified_base (766)..(767): a, t, c, g, other or unknown
  modified_base (774): a, t, c, g, other or unknown
  modified_base (798): a, t, c, g, other or unknown
  modified_base (802): a, t, c, g, other or unknown
  modified_base (807): a, t, c, g, other or unknown
  modified_base (813)..(814): a, t, c, g, other or unknown
  modified_base (817)..(818): a, t, c, g, other or unknown
  modified_base (828): a, t, c, g, other or unknown
  modified_base (834): a, t, c, g, other or unknown
  modified_base (836): a, t, c, g, other or unknown
gaattcggcacgagcctgtctggaggagtggtagtgagtgctatattcttcattttgtctgccaatatcttatcatctccctctaagagaggacaaaaaggtacccttattggatattctcctgaaggaacacctctttataacttcatgggtgatgcttttcagcatagctctcaatcgatccctaggtttattaaggaatcactaaaacaaattcttgaggagagtgactctaggcagatcttttacttcttgtgcttgaatctgctttttacctttgtggaattattctatggcgtgctgaccaatagtctgggcctgatctcggatggattccacatgctttttgactgctctgcttnagtcatgggactttttgctgccctgatgagtaggtggaaagccactcggattttcnccaagggtacggccgaataaaaattctgtctggatttatnaatgggcctttttccaaanagnaaanagcggtttttggggttangggagncaagnggcaagatggattggancccccaggaattaaggcnncccacanngnaaacacccagnnccanttggngggngnnnaannaaaccctnantgggaccngggnccttnanccaaggcccaagncangcccaggggggctccncaaggggagnngcancnaaanngggncaaaggnctttcaaacncannggnggggncaagggacccngggggnggggcaaccncggggtnnggggggggngnaaaacncaaaannggggggnatcccaaaaggttgggaaaaaccntggnaaaangggggnncgnnccaaaggccnaaaaangngtggggggc

SEQ ID NO: 162 - DNA, 496 bp, Homo sapiens
tgtaatacctcctcatcttttcttcttacacagtgtctgagaacatttacattatagataagtagtacatggtggataacttctacttttaggaggactactctcttctgacagtcctagactggtcttctacactaagacaccatgaaggagtatgtgctcctattattcctggctttgtgctctgccaaacccttctttagcccttcacacatcgcactgaagaatatgatgctgaaggatatggaagacacagatgatgatgatgatgatgatgatgatgatgatgatgatgatgatgaggacaactctctttttccaacaagagagccaagaagccattttttttccatttgatctgtttccaatgtgtccatttggatgtcagtgctattcacgagttgtacattgctcagatttaggtttgacctcagtcccaaccaacattccatttgatactcgaatgcttgatcttcaaaacaataaaattaaggaa

SEQ ID NO: 163 - DNA, 491 bp, Homo sapiens
taaggattaaaaacgattttaattatacacatatggtcacaattttgccttaaaaagattgttgggaaatgtacataaggccgcttgtaaatgtacatcgtgttactgttatgtcttatgtccagaggaaaaaatgttatcatacagatttgctcttacttgggagtaggctattcaaaaatacagtactcttctgtacaaagaaaaaagtcacatcacatttaataagatgaaaaaagcattggcctccatggtaaccaaatatctcagtccaatactttctattatgcacaataccctgacttcaattgaaagtgatccaaattctagcaggtccatattaacagtcaacaactatgttataaaacaaaatgatctcacaataataaaaagaaagctggttcatacttctgaaaccatataaagataaaaaatttttaaaaaatcactctcgatttggagaaataaatttacattatacaacactatat

SEQ ID NO: 164 - DNA, 457 bp, Homo sapiens
  modified_base (448): a, t, c, g, other or unknown
  modified_base (454): a, t, c, g, other or unknown
tttttctgtttatgacactttattgatgctgggggggtggggaggagacctggagaaatatgtgggggcaagagtccccaggtggggacagggaaagtgttgaagcctggccactactgggcagggaagacagagttgccactgtatgcacaggggatgagcagctgccggtactccaggggcaggtgccgctccactagcacgtgcagtgagacttggtcagtgaccaggccctgccgccgcatcagcagctccaggtcctctggcttcacagtcttgcggccagcatgagcagcaaatacctccagatcatcacaaagatgctggaaatatttatctaggcacttctccaccatctcaagagccttcctctccatgggcatcttggcatagaagctaaagagtttcacatagtggctcagtccagccttgtggggatcttgccggngcctgnggc

SEQ ID NO: 165 - DNA, 477 bp, Homo sapiens
ttttttttttttttagttttcttcccaaatggttcctcagccccagtgctgggccctgaaataggcccagctccctgtatagttcccacagagctggccacaccataagtcaggggcaaactggaactgtgggaaggagctgcagcctgtacttccccttcagttagagcctgaagctggaggagcttctttagcaagtaccttctttcttcttttgctttaagaaatttttcctcaagacgagcaatttcatcacaaatagcagcattttcaaacaccgtggccttggccgctttgcgcagccgcaggtacttcagccggtacttctcattctggctcttcttcgggagctttttcatcctggccttgctggactgcagcggagcccgcggcgaggaagcgaggccgtccagcaggctcatggtccagccccgctacgggggccccaggacgctgccggcatcggatcctaagtcg

SEQ ID NO: 166 - DNA, 468 bp, Homo sapiens
gagaagacgacagaaggggctactgcggcagaaccagagggccctgaaccgtgccatgcgggagctggaccgcgagcgacagaaactagagacccaggagaagaaaatcattgcagacattaagaagatggccaagcaaggccagatggatgctgttcgcatcatggcaaaagacttggtgcgcacccggcgctatgtgcgcaagtttgtattgatgcgggccaacatccaggctgtgtccctcaagatccagacactcaagtccaacaactcgatggcacaagccatgaagggtgtcaccaaggccatgggcaccatgaacagacagctgaagttgccccagatccagaagatcatgatggagtttgagcggcaggcagagatcatggatatgaaggaggagatgatgaatgatgccattgatgatgccatgggtgatgaggaagatgaagaggagagtgatgctgt

SEQ ID NO: 167 - DNA, 399 bp, Homo sapiens
  modified_base (332): a, t, c, g, other or unknown
  modified_base (357): a, t, c, g, other or unknown
  modified_base (362): a, t, c, g, other or unknown
tttttttttcttaggtttataatcagcatcatcctcatctcgaggtctctttaatggctttatatcctctttaggaggaacaaaatagccatcatcttcaggttcatctttaatttgtggtggactagagaagccattttccttctccttctttatttttgcatccccagaggctcgaaccttttcctcttttcgtttttccttgtctctgtctttatgtttgtctttatgcttttctgagcttccatctttgtgtttggtcttctccttctctttgtgtttcttttcagaatctttatgttcactgttgctatgcttggacttttcccggnccttctcctttctgggttcttttgngccgnggtctcgatcctttggttatttttgtgttatgagaat

SEQ ID NO: 168 - DNA, 557 bp, Homo sapiens
gagcccaagcgccttctccgcaccagggaagccccacccaccagaagccaagatgtccagcaagcgggccaaagccaagaccaccaagaagcggccacagcgggccacatccaatgtcttcgcaatgtttgaccagtcccagatccaggagtttaaggaggctttcaacatgattgaccagaaccgtgatggcttcattgacaaggaggacctgcacgacatgctggcctcgctggggaagaaccccacagacgaatacctggagggcatgatgagcgaggccccggggcccatcaacttcaccatgttcctcaccatgtttggggagaagctgaacggcacggaccccgaggatgtgattcgcaacgcctttgcctgcttcgacgaggaagcctcaggtttcatccatgaggaccacctccgggagctgctcaccaccatgggtgaccgcttcacagatgaggaagtggacgagatgtaccgggaggcacccattgataagaaaggcaacttcaactacgtggagttcacccgcatcctcaaacatggcgccaagg

SEQ ID NO: 169 - DNA, 564 bp, Homo sapiens
acgacttggccatgctgaaacagatgaacaattacagaatattatatctaaattccttcctcctgttttgctcaaactctctagcacccaagaaggagtacgtaaaaaggtaatggaactgctggtccatctgaataaacgtataaaaagccgccccaaaatacaacttccagtagagacactgttggttcagtaccaggaccctgctgcagtttcctttgtcacaaattttactataatttatgttaaaatgggctatcctcgcctaccagtggaaaaacaatgtgaactggcccctacgcttcttactgccatggaagggaagcctcagccacagcaggatagcttaatgcatcttttaataccaaccctttttcacatgaaataccctgttgaatcatcaaaatcagcttctccatttaatcttgctgagaaaccaaagactgtgcagctgcttttggacttcatgctagatgtccttctgatgccttatggttacgtgttaaatgaatcccagagtcgccaaaattcatcttcagcacagggttcttctttcaacagtgg

SEQ ID NO: 170 - DNA, 457 bp, Homo sapiens
  modified_base (395): a, t, c, g, other or unknown
gattgtatggtggggtggtgacctatttttacaaattatacctaatgagtaaaattagtgtaaagtgataacatgcttctacctgtatttctagtgaccctttagcggcaggtatttatacctggtatttatgatgcagtatataagtggtgaacaataactgacagtattgtgcttgctgtacatgtctggtcttttgaaacagattttagtaagcattttccagaggtaaaactgtgtccttattctaattttattcctagggcaaagtagacagggattatttccttgaatctatttccaaattaatatttttttctttggtatttctacactttaaggccatttggtgcaatttagaaagtgttggcctcccttccgctagccacattcanaattaacttccaaaacctcaggaacagtacaaagaattgaaaccctcaatatggcagcacag

SEQ ID NO: 171 - DNA, 527 bp, Homo sapiens
ttttttttttgatggatactaagggagtattttactgaaaaaaatagaaaactacatttttacacgaaataaacttatgtctgcaatactcagccttaaattcacccctcacttcagaagaggtcccaggggcaggaataacacgcacagattgtttgttcacgacttccagccggtccaccagacctctggccaggtaatactgtacaaagtgcttccacgtgatttctcttccaggatctcgaaaatagaggtagaaaaatcccatggcaacgcctgcccccaaaagggccagactgcggaaatcctcgtcatcccaggggaagtccccccttctgcatccgcctccaccaggcaacgttatcctgcttccctcctctcctgcctccgtctcctccagactcagcattctctagttcaccagtctctttgggtggttttgaacacagccaccaggaaaataacgtcggtcttgcctgcagagtcagcttctgaacgtggatcccctggaagcactggaacaggag

SEQ ID NO: 172 - DNA, 546 bp, Homo sapiens
cggcacgagggacaacgcagcctgataaacaagtggacgacttttcttaaggccagactgatttgctcaattcctggaagtgatggggcagatacttactttgatgagcttcaagatatttatttactccccacaagagatgaaagaaatcctgtagtatatggagtctttactacaaccagctccatcttcaaaggctctgctgtttgtgtgtatagcatggctgacatcagagcagtttttaatggtccatatgctcataaggaaagtgcagaccatcgttgggtgcagtatgatgggagaattccttatccacggcctggtacatgtccaagcaaaacctatgacccactgattaagtccacccgagattttccagatgatgtcatcagtttcataaagcggcactctgtgatgtataagtccgtatacccagttgcaggaggaccaacgttcaagagaatcaatgtggattacagactgacacagatagtggtggatcatgtcattgcagaagatggccagtacgatgtaatgtttcttgga

SEQ ID NO: 173 - DNA, 710 bp, Homo sapiens
  modified_base (532): a, t, c, g, other or unknown
  modified_base (593): a, t, c, g, other or unknown
  modified_base (606): a, t, c, g, other or unknown
  modified_base (627): a, t, c, g, other or unknown
  modified_base (653): a, t, c, g, other or unknown
  modified_base (658): a, t, c, g, other or unknown
ctcttcttctatctgggctttcttttgagctcttctttgtttattacgtagcttctttagctctttgtcagacatgtttgctgtatcagcttcgtgttctttattctcatctgtaagggggttgtcatgaagcttcaaatagatctctatagcaattcttgctgccttgaagtaaaatggatgctgtcgaagtacatcttctagttttaataagtccacatatgatctaagggtaatcttcctcatacagtatgtatgaaagtcaaactggtcatcagtgatttctataaaatgtctctcaatctcatgacatttcttaagtgcttcaccaaatttattcattgctttataagcctgggcacattctgtttggaaccacatgcactgcatttcattcaaattctctaccgctgatgttccttcccttgtaaactttgagcacatttcttcagcttctttaatcaggttggcttttagcatgtattttgcacatttggagttgataaatctgtctgctgtgtccaaggcctgngcctcatccatccaccttgcagcttctttaatatttccagcatgcttatagattttagctntcacgagaaagangtctattaatgtagtgtactntcaatagcagtatttatgtactccanagcantagatggctgaccaattttgtcataatggtgtgccaagtagtacttgaccca

SEQ ID NO: 174 - DNA, 409 bp, Homo sapiens
ggcacgagcattactacatgtccacaggaagtacaaaagccatcttcatttgaacgtaaatacaataatcctgaaattcttagcaccaagtattacttttaaaagtaaagacaaccgagtgctctccccacatattgttgacttccttctactcacactgcatgtcatttgagattttaaaaagttagctgccacagttttggaaaatgccagtgtttaaaaataattgtgttaaagaatcaaaagtttagcgtaacagattttgagtacttcaaaccattcaatgttacaaagaaaagtgaaaataccattctttggtctagattagctgttccctttacattaatttaacattccgatggctttttgaaaactttaaaaatgttgaaactcactagacaaaacaaaa

SEQ ID NO: 175 - DNA, 410 bp, Homo sapiens
ggcacgagctttgcagggaatgaatactggatctactcagccagcaccctggagcgagggtaccccaagccactgaccagcctgggactgccccctgatgtccagcgagtggatgccgcctttaactggagcaaaaacaagaagacatacatctttgctggagacaaattctggagatacaatgaggtgaagaagaaaatggatcctggcttccccaagctcatcgcagatgcctggaatgccatccccgataacctggatgccgtcgtggacctgcagggcggcggtcacagctacttcttcaagggtgcctattacctgaagctggagaaccaaagtctgaagagcgtgaagtttggaagcatcaaatccgactggctaggctgctgagctggccctggctcccacag

SEQ ID NO: 176 - DNA, 473 bp, Homo sapiens
ttttttttttttttttttacaaaggaaaacaaagctacttttggttttggcaacattaaaaaagaaagaaatataaaaagcaatgtggcattggtccctattcattaaaaaaaaagggtacttgggcacgacacaatcagaattagtttgttttctaaaattcagagtatctgggattttaaaagtagcactttttaaaaagttcaacaagtcacataacacttaaaacatcaaaaaagctttctgataaaaagctcagcttttaaatcacgttttgtttctgcaaatttgggagacaaattgagttcttactggaatgtggcctatcgctggttgacaaatctgaaatggaatgtctccaaatggcagtgcctccctttccgccctccctaggaccacaccaataaccagctcccaagcacaagttcttgctcccattttttctgtaggggtgggggtgggaccttcaggct

SEQ ID NO: 177 - DNA, 423 bp, Homo sapiens
tttttttttttttttttttacaaagctttctgtaaatattttattttccatattttagagtcagaaagaagcgcttggtaataaaaataatagagaattattttcttcaagcccgctctgcgctgcgccggcctccccgcgcccgggcccacggctgagtgcgcggcgtcagaggccccaagtccatctcactatttacagatatgttacaggccgggatggtcacagaggaaagcccagctctcagcatggccccacgtggtgaggagcccccaggctcctcccggctgtctcggacagagactgagaagcctgccgcgtcccgtgggggcctaggctgcggcgggctccacgggggggcaggagtgggccgtgatgtcgctgtgcttgtacgccgcctcgtccaggtccagcagcctccgg

SEQ ID NO: 178 - DNA, 304 bp, Homo sapiens
tcaggttcaagtgctggattgtgtcatgtgaccatcccaaaactcagagcaccctatggccgtctttgccctctgtcacataacttgaaaactgcctgatggcctttttgcagtggttccctccaggaagccttgatctcagttgaagaagttctttcctggcattccaatgcccctgtcagctccatactcctcagacacccttaacaaaggctgtcatgcacacaatgtgacaaatacacaaaataaatgataattacactaataatgatatgttcagaggggcactggccaggtccacaca

SEQ ID NO: 179 - DNA, 541 bp, Homo sapiens
ggggcaaagaaaaatgtgaaggattcgaactgcacttctggagaaaaatatgtcgtaactgcaagtgtggccaagaagagcatgatgtcctcttgagcaatgaagaggatcgaaaagtgggaaaactttttgaagacaccaagtataccactctgattgcaaaactaaagtcagatggaattcccatgtataaacgcaatgttatgatattgacgaatccagttgctgccaagaagaatgtctccatcaatacagttacctatgagtgggctcctcctgtccagaatcaagcattggccaggcagtacatgcagatgctacccaaggaaaagcagccagtagcaggctcagagggggcacagtaccggaagaagcagctggcgaagcagctccctgcacatgaccaggacccttcaaagtgccatgagttgtctcccagagaggtgaaggagatggagcagtttgtgaagaaatataagagcgaagctctgggagtaggagatgtcaaacttccctgtgagatggatgcccaaggccccaa

SEQ ID NO: 180 - DNA, 685 bp, Homo sapiens
tcgtggaacaaaagttatcctacacctgaaagaagaccaaactgagtacttggaggaacgaagaataaaggagattgtgaagaaacattctcagtttattggatatcccattactctttttgtggagaaggaacgtgataaagaagtaagcgatgatgaggctgaagaaaaggaagacaaagaagaagaaaaagaaaaagaagagaaagagtcggaagacaaacctgaaattgaagatgttggttctgatgaggaagaagaaaagaaggatggtgacaagaagaagaagaagaagattaaggaaaagtacatcgatcaagaagagctcaacaaaacaaagcccatctggaccagaaatcccgacgatattactaatgaggagtacggagaattctataagagcttgaccaatgactgggaagatcacttggcagtgaagcatttttcagttgaaggacagttggaattcagagcccttctatttgtcccacgacgtgctccttttgatctgtttgaaaacagaaagaaaaagaacaatatcaaattgtatgtacgcagagttttcatcatggataactgtgaggagctaatccctgaatatctgaacttcattagaggggtggtagactcagaggatctccctctaaacatatcccgtgagatgttgcaacaaagcaaaattttg

SEQ ID NO: 181 - DNA, 207 bp, Homo sapiens
  modified_base (198): a, t, c, g, other or unknown
ttctcagaggaacgagaatgaatatgactcaagcccgggttctggtggctgcagtggtggggttggtggctgtcctgctctacgcctccatccacaagattgaggagggccatctggctgtgtactacaggggaggagctttactaactagccccagtggaccaggctatcatatcatgttgcctttcattactacgnttcagaatc

SEQ ID NO: 182 - DNA, 530 bp, Homo sapiens
aaatcattctggttcacggacacctccagtagcactcaacagttccagaatgagctgcttcagtcgtcctagcatgtccccaacacctcttgatcgctgcagatcacctggaatgcttgaaccccttggcagctctagaacacccatgtctgtcctgcagcaagccggcggctccatgatggatggtccaggtccccgaatacctgaccaccagagaacatctgtgccagaaaatcatgctcagtccaggattgcacttgccctgacagctatcagtcttggcaccgctcggcctcctccgtccatgtctgctgctggccttgctgcaagaatgtcccaggttccagccccggtgcctctcatgagtctcagaaccgcaccagcagccaaccttgccagcaggattcctgcagcctctgcggcagccatgaacctagccagcgccaggacacctgccattccaacagcagtgaacctggctgactctcgaacgccagctgcagcagcggccatgaacttggccagcccca

SEQ ID NO: 183 - DNA, 526 bp, Homo sapiens
tgtagatcaactgaggcatctacttgtgagtaatgtgggaggagatggagaagagattgaaagattctttaaattacatcaggaagaccaggcttgtgcaacttgccttattcttgcttgctccactgctgcctgtgatagagaagtatctgcctgggctactcgggctttctttaggtatggtggtgaagcacagatgagatttccaaccactcttccgcctccaagtaatgttggtcccatcttggggtctcctgtctattctagttctcctgttcctagtggtagtccctatccaaatccatcctttttgggaacaccgtctcatggtatacagcctcctgccatgtcaactccagtgtgtgctctgggaaacccagcaactcaggccacaaatatgagttgtgtgactggaccagagattgtgtactctggaaaacacaatgggatttgcatttacttttctcggatcatgggaaacatttgggatgcaagcttagttgtggagagaatattcaagagtggc

SEQ ID NO: 184 - DNA, 612 bp, Homo sapiens
gaagaagaggaagaggaggaggaggaagagcagccgcaggcagcacagcctcccaccctgcccgtggaggagaagaagaagattccagatccagacagcgatgacgtctctgaggtggacgcgcggcacatcattgagaatgccaagcaagatgtcgatgatgaatatggcgtgtcccaggcccttgcacgtggcctgcagtcctactatgccgtggcccatgctgtcactgagagagtggacaagcagtcagcgcttatggtcaatggtgtcctcaaacagtaccagatcaaaggtttggagtggctggtgtccctgtacaacaacaacctgaacggcatcctggccgacgagatgggcctggggaagaccatccagaccatcgcgctcatcacgtacctcatggagcacaaacgcatcaatgggcccttcctcatcatcgtgcctctctcaacgctgtccaactgggcgtacgagtttgacaagtgggccccctccgtggtgaaggtgtcttacaagggatccccagcagcaagacgggcctttgtcccccagctccggagtgggaagttcaacgtcttgctgacgacgtacgagtacatcatcaaagac

SEQ ID NO: 185 - DNA, 433 bp, Homo sapiens
gtttcttccagacaaaggaatatcaaaacacttcggcacaagtacaacaaaggcatgggaagatcatgataatgttttacatcacattttacagcattttattttaatcagtatttgtagaaaacaaggatgctgagttcttgaacactgcagtcacaaactcaaactaaaatttccaaaaaaaggaaagaaaacactgaactacttggtcaactgaacatctgtaataataaatgtaacgaaacctaaccaaataaatatgccactgagatcacaactgaagtgtatggtttttagtgtgtgccagagacattaaattatttaatcagtttttgactacaacccaaagcaaagcatcctctctgtttccctgatgatttattctaaaagtaaccttaaaaagcagaaacttgctggttaaagagaatttctg

SEQ ID NO: 186 - DNA, 377 bp, Homo sapiens
  modified_base (306): a, t, c, g, other or unknown
  modified_base (335)..(336): a, t, c, g, other or unknown
ataatgcaagcccttgcatggcaatccaaatttattgaactactgatgctaagttatacaaaattgcaccactttaattaaggcttttagtttacatttggccacctcaaagtagttgtaacattaggttggtcaatttaaatactgtggctccctgttggatagacacacaatctttacatccaaacattaatgcatacaaagcaacaaggcattgttaaataaaacagcaatagttactgcaaattaggccttgtgaccaattacatatgattaaaattacttcccacattcacatccacagtnactcgtccaccatttaacatctcaccaannacgttacacatgtgaaacaatcactaacaggcaaaaatact

SEQ ID NO: 187 - DNA, 413 bp, Homo sapiens
gctgtaggtcgaggggaagacttagactccttctttatattgggtttccttgagcctttggtggctgctttgtgtctgctggagggcatgctgctagccaagtctacaggggtttcactttctatcttcaggcctccacgaggctcttcagcagctgccttctcagcctttttgggttgttttttgcctacagttcttctctgtgttgtgctgtcactctgtgcaggagatttctgcctcccacgcccactttctgatcccttttggatggttttggagtctcgtcccggagtagcggaactcgtttctttaggtccacttgtatcagtgtagctattcccagtgccctgctctcggccttcctttttgtagccttgagatgatgggatgttactgtccactgaagaggcggg

SEQ ID NO: 188 - DNA, 378 bp, Homo sapiens
ctgaaaagccatctttgcattgttcctcatccgcctccttgcccgccgcagtcgcctccgccgcgcgcctcctccgccgccgcggactccggcagctttatcgccagagtccctgaactctcgctttctttttaatcccctgcatcggatcaccggcgtgccccaccatgtcagacgcagccgtagacaccagctccgaaatcaccaccaaggacttaaaggagaagaaggaagttgtggaagaggcagaaaatggaagagacgcccctgctaacgggaatgctaatgaggaaaatggggagcaggaggctgacaatgaggtagacgaagaagaggaagaaggtggggaggaagaggaggaggaagaagaaggtgatg

SEQ ID NO: 189 - DNA, 545 bp, Homo sapiens
tctgtcagaagttgtagcagtgttgtatactgtttgatttcatggactctgtttcagacttgaagagcaaagaaattaaaagagcaacactgaatgaactggttgagtatgtttcaactaatcgtggtgtaattgttgaatcagcgtattctgatatagtaaaaatgatcagtgctaacatcttccgtacacttcctccaagtgataatccagattttgatccagaagaggatgaacccacgcttgaggcctcttggcctcacatacagttggtatatgaattcttcttgagatttttggagagccctgatttccagcctagcattgcaaaacgatacattgatcagaaatttgtacaacagctcctggagctttttgatagtgaagatcccagagaacgtgacttcctgaagactgttctgcaccgaatttatgggaaatttcttggattaagagcattcatcagaaaacaaattaacaacattttcctcaggtttatatatgaaacagaacatttcaatgggttgctgaacttcttgaatatt

SEQ ID NO: 190 - DNA, 648 bp, Homo sapiens
  modified_base (580): a, t, c, g, other or unknown
  modified_base (614)..(615): a, t, c, g, other or unknown
  modified_base (622): a, t, c, g, other or unknown
  modified_base (629): a, t, c, g, other or unknown
gggtgtgcgattgtgtgggacggtctggggcagcccagcagcggctgaccctctgcctgcggggaagggagtcgccaggcggccgtcatggcggtgtcggagagccagctcaagaaaatggtgtccaagtacaaatacagagacctaactgtacgtgaaactgtcaatgttattactctatacaaagatctcaaacctgttttggattcatatgtttttaacgatggcagttccagggaactaatgaacctcactggaacaatccctgtgccttatagaggtaatacatacaatattccaatatgcctatggctactggacacatacccatataatccccctatctgttttgttaagcctactagttcaatgactattaaaacaggaaagcatgttgatgcaaatgggaagatatatcttccttatctacatgaatggaaacacccacagtcagacttgttggggcttattcaggtcatgattgtggtatttggagatgaacctccagtcttctctcgtcctatttcggcatcctatccgccataccaggcaacggggccaccaaatacttcctacatgnccagcatgccaggtggaatctctccatacccatnncgatacnctcccantcccagtgggtacccagct

SEQ ID NO: 191 - DNA, 339 bp, Homo sapiens
gctgtttaagctcaggctaaagatgatataaatagaggtgcaccatccatcacatctgtcacaccaagaggactgtgcagagatgaggaagacacctcttttgaatcactttctaaattcaatgtcaagtttccacctatggacaatgactcaactttcttacatagcactccagagagacccggcatccttagtcctgccacgtctgaggcagtgtgccaagagaaatttaatatggagttcagagacaacccagggaactttgttaaaacagaagaaactttatttgaaattcagggaattgaccccatagcttcagctatacaaaaccttaaaaca

SEQ ID NO: 192 - DNA, 252 bp, Homo sapiens
  modified_base (95): a, t, c, g, other or unknown
  modified_base (141): a, t, c, g, other or unknown
  modified_base (223)..(224): a, t, c, g, other or unknown
tgatagtgatggatggacgccgctgcactgcgctgcctcttgtaacagcgttcacctctgcaaacagctggtggagagtggtgccgccatttttncctcaaccataagcgacattgaaactgctgcagacaagtgtgaggngatggaggaaggctacatccagtgctcccagtttctatatggggtgcaggtgaagctgggtgtgatgaacaaaggtgtggcnnatgctctgtgggactacgaggcccagaa

SEQ ID NO: 193 - DNA, 272 bp, Homo sapiens
gacaaacaggactacccgcagccctcggacctgtccacctttgtaaacgagaccaaattcagttcacccactgaggagttggattacagaaactcctatgaaattgaatatatggagaaaattggctcctccttacctcaggacgacgatgccccgaagaagcaggccttgtaccttatgtttgacacttctcaggagagccctgtcaagtcatctcccgtccgcatgtcagagtccccgacgccgtgttcagggtcaagttttgaagagac

SEQ ID NO: 194 - DNA, 334 bp, Homo sapiens
  modified_base (5): a, t, c, g, other or unknown
  modified_base (30): a, t, c, g, other or unknown
  modified_base (72): a, t, c, g, other or unknown
  modified_base (92): a, t, c, g, other or unknown
gagancctggaaaaattaaccacatgaganacgatacactagcccagatgttgacgttgggaaatatccgtnctggcaacaaaatgattgtnatggaaacgtgtgcaggcttggtgctgggtgcaatgatggaacgaatgggaggttttggctccattattcagctataccctggaggaggacctgttcgggcagcaacagcatgttttggatttcccaaatcttttctcagtggtctttatgaattccctctcaacaaagtgggacagtcttctacatggaacattttctgccaagatgttatcttcagagccaaaagacagtgctttggttg

SEQ ID NO: 195 - DNA, 352 bp, Homo sapiens
  modified_base (270): a, t, c, g, other or unknown
ttttggttttgtcaaatgttttattgagtgtagacatctggagtactgtaaaacatgcattatctgtagattcaaaaaggagcaagccacattgtcctcactgtcaaatgtgtcaggcttggcatacatgatggagattaatgaagtatcatgagagtaatatggttcctgaaaagcttctacaatttggagtagggtcttaatcacgtgaaaaagcaaactgttcacatttagtgaacctgcatttcatggaggggggggggtacacantattttaattttaaaacaaataaaaataatttgtttgtcaaagattcccatctccccaactttatttgtcgcattggttttc

SEQ ID NO: 196 - DNA, 355 bp, Homo sapiens
ttatgaagaagaaattattcattttaagaaagaacttcgagaaccacaatttcgggatgctgaggaaaagtatagagaaatgatgattgttatgaggacaacagaacttgtgaacaaggatctggatatttattataagactcttgaccaagcaataatgaaatttcacagtatgaaaatggaagaaatcaataaaattatacgtgacctgtggcgaagtacctatcgtggacaagatattgaatacatagaaatacggtctgatgccgatgaaaatgtatcagcttctgataaaaggcggaattataactaccgagtggtgatgctgaagggagacacagccttggatatgcga

SEQ ID NO: 197 - DNA, 456 bp, Homo sapiens
gcacgagtctacatccagaggaccaagagcatgttccagaggaccacgtacaagtatgagatgattaacaagcagaatgagcagatgcatgcgctgctggccattgccctcacgatgtaccccatgcgtattgatgagagcattcacctccagctgcgggagaaatatggggacaagatgttgcgcatgcagaaaggtgacccacaagtctatgaagaacttttcagttactcctgccccaagttcctgtcgcctgtagtgcccaactatgataatgtgcaccccaactaccacaaagagcccttcctgcagcagctgaaggtgttttctgatgaagtacagcagcaggcccagctttcaaccatccgcagcttcctgaagctctacaccaccatgcctgtggccaagctggctggcttcctggacctcacagagcaggagttccggatccagctt

SEQ ID NO: 198 - DNA, 422 bp, Homo sapiens
gcacgagatactgtgaaataccttttctcacaaaaaggcaaatattgaagttgtttatcaacttcgctagaaaaaaaaaacacttggcatacaaaatatttaagtgaaggagaagtctaacgctgaactgacaatgaagggaaattgtttatgtgttatgaacatccaagtctttcttcttttttaagttgtcaaagaagcttccacaaaattagaaaggacaacagttctgagctgtaatttcgccttaaactctggacactctatatgtagtgcatttttaaacttgaaatatataatattcagccagcttaaacccatacaatgtatgtacaatacaatgtacaattatgtctcttgagcatcaatcttgttactgctgattcttgtaaatctttttgcttctactttcatcttaaact

SEQ ID NO: 199 - DNA, 446 bp, Homo sapiens
cgatggagacatcaaacaagagccaggaatgtatcgggaaggacccacataccaacggcgaggatcacttcagctctggcagtttttggtagctcttctggatgacccttcaaattctcattttattgcctggactggtcgaggcatggaatttaaactgattgagcctgaagaggtggcccgacgttggggcattcagaaaaacaggccagctatgaactatgataaacttagccgttcactccgctattactatgagaaaggaattatgcaaaaggtggctggagagagatatgtctacaagtttgtgtgtgatccagaagcccttttctccatggcctttccagataatcagcgtccactgctgaagacagacatggaacgtcacatcaacgaggaggacacagtgcctctttctcactttgatgagagcatggcctacatgc

SEQ ID NO: 200 - DNA, 581 bp, Homo sapiens
cgaaaagaaatcagaaatggaaagtgttttggcccagcttgataactatggacagcaagaacttgcggatctttttgtgaactataatgtaaaatctcccattactggaaatgatctatcccctccagtgtcttttaacttaatgttcaagactttcattgggcctggaggaaacatgcctgggtacttgagaccagaaactgcacaggggattttcttgaatttcaaacgacttttggagttcaaccaaggaaagttgccttttgctgctgcccagattggaaattcttttagaaatgagatctcccctcgatctggactgatcagagtcagagaattcacaatggcagaaattgagcactttgtagatcccagtgaggaaagaccaccccaagttccagaatgtggcagaccttcacctttatttgtattcagcaaaagcccaggtcagcggacagtccgctcggaaaatgcgcctgggagatgctgttgaacagggtgtgattaataacacagtattaggctatttcattggccgcatctacctctacctcacgaaggtggaatatcttcagataaac

SEQ ID NO: 201 - DNA, 625 bp, Homo sapiens
  modified_base (319): a, t, c, g, other or unknown
  modified_base (604): a, t, c, g, other or unknown
  modified_base (615): a, t, c, g, other or unknown
gtcctggcccagagcctggacggggctgaaggacacgggggacagggctcctggcttcttccgccccgtcctggcccagagcctggagcatgatgagcactcttgtccctttaaaaaatcaaagccgcaccccgcctccctggccagcaagaaacctaaaagggaaacaaactctgacagcgtcccacctggctacgagcccatctcgctgctcgaggcgctcaacggcctccgggctgtctccccggccatcccctcggcccctctttatgaagaaatcacctattcaggcatctcggacggcctgtcccaggccagntgtcccctcgcggctatcgaccacatcctggacagcagccgccagaagggcaggccgcagagcaaggcccccgacagcaccctacggtccccgtcttcccccatccacgaagaggatgaggagaagctctccgaggacgtggacgcccctcccccactgggtggcgcagagctggccctgcgggaaagcagctcccctgagagtttcataacagaagaggttgatgagtcgtctgtcaccacaagcaaggggacccgagcagcttccattgagaatgtcctgcangacaagcaagncccgagcact

SEQ ID NO: 202 - DNA, 806 bp, Homo sapiens
  modified_base (622): a, t, c, g, other or unknown
  modified_base (645): a, t, c, g, other or unknown
  modified_base (655): a, t, c, g, other or unknown
  modified_base (658): a, t, c, g, other or unknown
  modified_base (706): a, t, c, g, other or unknown
  modified_base (733): a, t, c, g, other or unknown
  modified_base (742): a, t, c, g, other or unknown
  modified_base (757): a, t, c, g, other or unknown
  modified_base (772): a, t, c, g, other or unknown
  modified_base (791): a, t, c, g, other or unknown
  modified_base (793): a, t, c, g, other or unknown
tctagtttttggaatggagcctcgcatcctatacaaccctttacaaggccagaaatgtattgttcaaacaacttcatggtcccagtgctcaaagacctgtggaactggtatctccacacgagttaccaatgacaaccctgagtgccgccttgtgaaagaaacccggatttgtgaggtgcggccttgtggacagccagtgtacagcagcctgaaaaagggcaagaaatgcagcaagaccaagaaatcccccgaaccagtcaggtttacttacgctggatgtttgagtgtgaagaaataccggcccaagtactgcggttcctgcgtggacggccgatgctgcacgccccagctgaccaggactgtgaagatgcggttccgctgcgaagatggggagacattttccaagaacgtcatgatgatccagtcctgcaaatgcaactacaactgcccgcatgccaatgaagcagcgtttcccttctacaggctgttcaatgacattcacaaatttagggactaaatgctacctgggtttccagggcacacctagacaaacaagggagaagatgtcagaatcagaatcatggagaaaatgggcgggggtggtgtgggtgatgggactcantgtagaaaggaagccttgctcantcctgaggancantaaggtatttcgaaactgccaagggtgctggtgcggatggacactaangcagccacgattggagaatactttgcntcatagtantggagcacagttacngctcaatttggagcntgtggaattgagacttccngnttccggttgaaat

SEQ ID NO: 203 - DNA, 489 bp, Homo sapiens
  modified_base (465): a, t, c, g, other or unknown
  modified_base (467)..(468): a, t, c, g, other or unknown
gcacgagcggcacgagtttcatttttccaaaagagaaaaaaatgacaaaaggtgaaacttacatacaaatattacctcatttgttgtgtgactgagtaaagaatttttggatcaagcggaaagagtttaagtgtctaacaaacttaaagctactgtagtacctaaaaagtcagtgttgtacatagcataaaaactctgcagagaagtattcccaataaggaaatagcattgaaatgttaaatacaatttctgaaagttatgttttttttctatcatctggtataccattgctttatttttataaattattttctcattgccattggaatagatatctcagattgtgtagatatgctatttaaataatttatcaggaaatactgcctgtagagttagtatttctatttttatataatgtttgcacactgaattgaagaattgttggttttttcttttttttgtttngnnttttttttttttttttttttg

SEQ ID NO: 204 - DNA, 403 bp, Homo sapiens
  modified_base (314): a, t, c, g, other or unknown
  modified_base (350): a, t, c, g, other or unknown
  modified_base (368): a, t, c, g, other or unknown
  modified_base (376): a, t, c, g, other or unknown
caagctcagaagggtcatctcagagttcactctctcctgtactcattggtggaaaccatttgatcactgcaggtgtgccaaggcgaagtaaaagaattgcaggcaaaaaagtttgcagagtggaatcaggaaaagcaggctgcttttctcctaaaatcaagccataaagaaaaggttccgaagatctctgccgtttgaaattcaatctagggaaaaatggcagagaagtaaatgggatgttctggtgtcaataggatattgaaagtgttggttgggcgacttgcaaatcaacaaagtttaaaaaatccgaattngaatctgtaaaaacaggtttgctttttaagcccagnatgttggattggaaaaangttaccanaagaaaggggttcaagaaaaaggatca

SEQ ID NO: 205 - DNA, 462 bp, Homo sapiens
tttacaggtacacaatttaatatttattatatgcattttatatacattatttttcaacagctgtatgtttgctatgtggtacaatcttaaaaatttgctgattcatagtttgtaaaacaaaaaccttacaaaactcatcaaaactcgcaaactgatcagaaaagtttctcggaagactagaaaaaatactttattgtcttaatcatgcattacacaaacaaaatctttagttacaccataaaattaagcacatctaaaaaaataaaacagggataactagtcaaaacacagcagatttctgtatcctgattcaactatttttgtatcctatttgtaatgcaaataaaactttactccaaatatttttaaacaagttagttttgtttggaatcatggtaaaccaagatatatatcttagggggaaccaccttggtttgtaatttaaactataaaatactccat

SEQ ID NO: 206 - DNA, 724 bp, Homo sapiens
gtcaggggctgtagcaagtacattagcttcaagttccttaacttggacattcaaatattcttcttgctctattaaacgctggatgcttgcagtaaatttttctagtgtgttcctcatttctcgttcactatgccgtaacttaactactctttcttcaagttgtactttctgttcttggatttgcattgcttttttagagtcgttttgcaactgtgattccattttgtttacctcttcttcagagatttcaataacaagtgaggaacccattcttcctttcattactttgcttccaccaccagtcattgtacctgactgttctatgatttgtccctgtaaagttaccactctccatcttctatctttttgatatgctactcttgtggcttgatccaagttgtcagctactaaggtatctcgtaaagcaaaataaaaagcttggcgaattttctcatcttttacttttactaaatcaaataaacgaggagtattttcaggagtttgaatttcggtcatctttttcgcccatacagccatcttatctaaacctataaaagttgcaactccaatatttttgtcttttaaggaagttacacatttcttgggctatatcaaatagatcaaccaacaatgtagtccagtgcatgacaacaggatgatataaccacctcggattttttattaatgggttctaaggccccaatcgtccatatatttctggaac

SEQ ID NO: 207 - DNA, 371 bp, Homo sapiens
  modified_base (15): a, t, c, g, other or unknown
  modified_base (24): a, t, c, g, other or unknown
  modified_base (28): a, t, c, g, other or unknown
cctcgtgcaagttanaggttcgcnggtntgcagacctcacagaagatcagctaccctcctgtgagagtctgaaggatactattgccagagctctgcccttctggaatgaagaaatagttccccagatcaaggaggggaaacgtgtactgattgcagcccatggcaacagcctccggggcattgtcaagcatctggagggtctctctgaagaggctatcatggagctgaacctgccgactggtattcccattgtctatgaattggacaagaacttgaagcctatcaagcccatgcagtttctgggggatgaagagacggtgcgcaaagccatggaagctgtggctgcccagggcaaggccaagaagtgaagg

SEQ ID NO: 208 - DNA, 359 bp, Homo sapiens
  modified_base (252)..(253): a, t, c, g, other or unknown
  modified_base (340): a, t, c, g, other or unknown
cggccatcacctcattcctgtcaaggagaacctcgttgacaaaatctggacagaccgtcctgagcgcccttgcaagcctctcctcacactgggcctggattacacaggcatctcctggaaggacaaggttgcagaccttcggttgaaaatggctgagaggaacgtcatgtggtttgtggtcactgccttggatgagattgcgtggctatttaatctccgaggatcagatgtggagcacaatccagtattttnntcctacgcaatcataggacttagagacggtcatgctcttcattgatggtgaccgcatagacggccccagtgttgaaggagcacctgntttctttaacttgggcttg

SEQ ID NO: 209 - DNA, 353 bp, Homo sapiens
  modified_base (325): a, t, c, g, other or unknown
tggcacgaggccgtgtccaagatgttttcagttcaacacacagtctcctccattattttgatcgtctgattcttaccggagccgaaagcaaaagtaatggggaagagggctatggccggagcttgagatacgccgctctgaatcttgccgccctgcactgccgcttcggtcactatcaacaggcagagctcgccctgcaggaggcaattaggattgcccaggagtccaacgatcacgtgtgtctccagcactgtttgagctggctttatgtgctggggcagaagagatccgatagctatgttctgctggagcattctgtgaaganggcagtacattttggggttaccgtacct

SEQ ID NO: 210 - DNA, 651 bp, Homo sapiens
tttttttgactgtcttcacattaatggagattggtgatttctcttcagcttttacttctcttggtgatgatggcttggaggctggagaaaatccacccagggttgaaagggctggagttccatccggattcaatccctttgcttttaatttggcttcttgtaaggctacttttcttttttctacttctttttccagtaattcatagtttggcttttttctggtataaagcctaagtgtttctatgcagatttcctggatttcctcttctgtagtaccaaaaagaagaaaccaatggggacgagttggcaacggaatctgaagtgctctagctgcaaggtagatgcaagcacatgctatagtctctggttgaaatcgaacaaacacattggttcgaagactgtcattcatgtaattccaggcagtttgaaccagggtttgattacgttcacattctaagacttgtaaatacataacaatgatcttatgaggatgcttgacatgaacacaaaatcccaactcctttagcaccctcctctctgctttgataacttgatttttggtgttaatgtagttctgatcaaggatcacggggcttggagtctttttccttttaactggcggaggtggtggaatacattaatcacatctct

SEQ ID NO: 211 - DNA, 789 bp, Homo sapiens
  modified_base (17): a, t, c, g, other or unknown
  modified_base (95): a, t, c, g, other or unknown
  modified_base (238): a, t, c, g, other or unknown
  modified_base (767): a, t, c, g, other or unknown
  modified_base (775): a, t, c, g, other or unknown
caagagcactacatgangggctctgacggcgccccggacactgggtacctgtggcatgttccattgacatccatcaccagcaaatccaacatggnccatcgatttttgctaaaaacaaaaacagatgtgctcatcctcccagaagaggtggaatggatcaaatttaatgtgggcatgaatggctattacattgtgcattacgaggatgatggatgggactctttgactggccttttanaaggaacacacacagcagccagcagtaatgatcgggcaagtctcattaacaatgcatttcagctcgtcagcattgggaagctgtccattgaaraggccttggatttatccctgtacttgaaacatgaaactgaaattatgcccgtgtttcaaggtttgaatgagctgattcctatgtataagttaatggagaaaagagatatgaatgaagtggaaactcaattcaaggccttcctcatcaggctgctaagggacctcattgataagcagacatggacagacgagggctcagtctcagagcaaatgctgcggagtgaactactactcctcgcctgtgtgcacaactatcagccgtgcgtacagagggcagaaggctatttcagaaagtgggaggaatccaatggaaacttgagcctgcctgtcgacgtgaccttggcagtgtttgctgtgggggcccagagcacagaaggctgggattttctttatagtaaatatcagttttctttgtccagtactgagaaaagccaaantgaatttnccctcttcagaaca

SEQ ID NO: 212 - DNA, 457 bp, Homo sapiens
caattaagggctttggcgggattggctccgcgtttgggctggtccgctgctccccacctaccagggtcggatccggagcccttccccgcggggcggggacctccaaacaaccgactcctttccagctgaagaaacacttaaattctggaaatagcgactcagtatcatggccagcagccttaatgaagatccagaaggaagcagaatcacttatgtgaaaggagacctttttgcatgcccgaaaacagactctttagcccactgtatcagtgaggattgtcgcatgggcgctgggatagctgtcctctttaagaagaaatttggaggggtgcaagaacttttaaatcaacaaaagaaatctggagaagtggctgttctgaagagagatgggcgatatatatattacttgattacaaagaaaagggcttcgcacaagccaacttatgaaaacttacag

SEQ ID NO: 213 - DNA, 727 bp, Homo sapiens
tttttttgctggtaatatattgctgcactgagtgtgtgcaatttttattcaaggtcatcgtgatgctgagaagtttcgttgataacctgtccatctctagtttcaaccgtcttaatcagaagtgtcctttttgagtgggtatcaaccagagggagtgaatccagattagtttccctcaggttcagggaggaaaagtttggaagaggcagagaaatcctgctctcctcgccttccagcagcttcctgtaggtggcaatctcaatgtcaagggccatcttaacattgagcaggtcttggtattcacgaaggtgacgagccatttcctccttcatattctgaatctcatcctgcaggcggccaatagtgtcttggtagttagcagcttcaacggcaaagttctcttccatttcacgcatctggcgttccagggactcattggttcctttaagggcatccacttcacaggtgagggactgcacctgtctccggtactcagtggactcctgctttgcctggcgcagggcgtcattgttccggttggcagcctcagagaggtcagcaaacttggatttgtaccattcttctgcctcctgcaagttcttggcagccacactttcattttgctgacgtacgtcacgcagggcagcgctgaggtcaagcttggaaacatccacatcgatttggacatgctgttcctggatctgagccttgcgcttctggatttcct

SEQ ID NO: 214 - DNA, 622 bp, Homo sapiens
gctcctgtcagtacacactcccaaacagttaaacccagctctaattccaactctgcaagagcttttaagcaaatgcaggacttgtctgcaacagagaaactcactccaagagcaagaagccaaagaaagaaaaactaaagatgatgaaggagcaactcccattaaaaggcggcgtgttagcagtgatgaggagcacactgtagacagctgcatcagtgacatgaaaacagaaaccagggaggtcctgaccccaacgagcacttctgacaatgagaccagagactcctcaattattgatccaggaactgagcaagatcttccttcccctgaaaatagttctgttaaagaataccgaatggaagttccatcttcgttttcagaagacatgtcaaatatcaggtcacagcatgcagaagaacagtccaacaatggtagatatgacgattgtaaagaatttaaagacctccactgttccaaggattctaccctagctgaggaagaatctgagttcccttctacttctatctctgcagttctgtctgacttagctgacttgagaagctgtgatggccaagctttgcccttccaggaccctgaggttgctttatctctcagttgtggc

SEQ ID NO: 215 - DNA, 448 bp, Homo sapiens
atagttaaacaactttattaacatagtcaagcagtgattaacattcacatctattatgtcacatcatacaaatgtaaatacaaaattactacagtacaatatatattctctgcatgatccaaaatatttggtggccccaaaaaactctctttaaaattcagcagcttatcaaaaattaaaaccgtattctatttaaaatggagatctgttagcacagagttagacttcaagaaatatcaatttagtacagtttgagaagttgcaggaggatatgtttgaaggacacattctaacatagtgtggcaggtacaggaaacatcagatttaaagcttttaagcataactcatacaacctaagttgtcagcagaaagatccagttatatttgtaactaaagctaatgctactaaattattgcacccaatgttaacatattaagtgtaaaactg

SEQ ID NO: 216 - DNA, 595 bp, Homo sapiens
  modified_base (585): a, t, c, g, other or unknown
tctgttctaatgtatcattaagctccttaaaatactggagaacagcttccttatcgccttggatcattttctcagaatgagatttttgttctttcagcttttcaataagatgggtaagatctgtccagtgtgtgtcagtcaactgttcaagcagtttttgaggagtgtccttttctttcaaataggcactttgaaggtcatctataggatgaccatgatgttgacctatggtaaggcaatgaccacaaactaattttttatctaatagacagtaaacatttaatggttgcctgtaatgttcagggcaggtgacaatatctggatggtcttcttgctggtacttttcaataatagcccttagtgcaaaattaacaggtaaagattcaatgccagttggagcaatttcagtaatacttctgcaattagggcacttgagtggaattcgtaaaggtctccatatataaaagttaccagatgcctgaagaatgttttccaaacaatttctacaaaatgtatgagagcatggcagtacacgaggatcttcaaaaatactataacatatgggacaagttaactcttgctcanaattgtgcat

SEQ ID NO: 217 - DNA, 153 bp, Homo sapiens
aagtgggtgggcttgccaagctcgacaccagtgcgactgaggccagggccctcggccttcaccttactggcgtcatgagagggctccaccttgactcggatggggctggtgggcgtggcctggtcagcaaagaggaccataatggtgtagctg

SEQ ID NO: 218 - DNA, 446 bp, Homo sapiens
tagatggctacttccggctcacagcagatgcccatcattacctctgcaccgacgtggcccccccgttgatcgtccacaacatacagaatggctgtcatggtccaatctgtacagaatacgccatcaataaattgcggcaagaaggaagcgaggaggggatgtacgtgctgaggtggagctgcaccgactttgacaacatcctcatgaccgtcacctgctttgagaagtctgagcaggtgcagggtgcccagaagcagttcaagaactttcagatcgaggtgcagaagggccgctacagtctgcacggttcggaccgcagcttccccagcttgggagacctcatgagccacctcaagaagcagatcctgcgcacggataacatcagcttcatgctaaaacgctgctgccagcccaagccccgagaaatctccaacctgctggtggct

SEQ ID NO: 219 - DNA, 581 bp, Homo sapiens
acggatagcggatctgcgacaggggctgctggacatcagcaaccatttcatcccctctgctgggcactttggctggtagactattttccatccgagtctcctcttcagctttttccgtttgctcagtttttggttcatctttcctctcaaactgtgatgcttcctgagactgatggtctgaaggagtacctggtctagcagatgatgatgaggtctggggagtttcctcactagcttcaactcctactctatctgttttctctccttctttcttatttgtcttatcgggttctttggcctcttcattatggctaccctcagagtcagagcactcctccccttcgtccacaggccggaagtccatctcctgctcttctggaataggctctttctgtactttttttagagaaaggaatgctccagatgagtcaaatgtacccatttcttcttcagcatcctctaagcaccattcgggcaagctatccctgtcatcatctatgcttccactgccagagcgaacccgataagacaaataagaaagaaggagagaaaacagatccgctagcagatccgctatccgt

SEQ ID NO: 220 - DNA, 372 bp, Homo sapiens
  modified_base (300): a, t, c, g, other or unknown
  modified_base (363): a, t, c, g, other or unknown
tttgaacataatagcacgatgttggaatccgacttggggaccatggtgataaacagtgaggatgaggaagaagaagatggaactatgaaaagaaatgcaacctcaccacaagtacaaagaccatctttcatggactactttgataagcaagacttcaagaataagagtcacgaaaactgtaatcagaacatgcatgaacccttccctatgtccaaaaacgtttttcctggattaactgggaaagttcctccaagatgggagactttttgactttttttggaaaaatcttaagttttaggnaggaacttaccaggttgcgggtttaaaaaggcacttgggacccccatggttggggaacggggnggttaggga

SEQ ID NO: 221 - DNA, 448 bp, Homo sapiens
ttttttttttttttatgatgcactccaagtgccatatgtctattttattcttcaggaaattatatttttcttttacaagagcacaacaggaaccaaagtaaaagagtaatagatacagcactcaggataaatcatatctttaaaataataataaaaaaatttacaccttgtcctatatcctgttagtattttcataatatggccatgattgaaaaaacaaaaagcaagcatctacaattttttttgataaagactttttatgccaggaatggattaattaccaacaaaatttatactaatcaggctgatgtcaatctatttttgtaatgtatcattaacaaatttattttggaaaagataaaaatattgccccttgataataaatctttttttcctttgatgcaaacagctagaacacctttttctttttctttttgatattctaaga

SEQ ID NO: 222 - DNA, 373 bp, Homo sapiens
gttgcacatgccgtcggccatgactgtgtatgctctggtggtggtgtcttacttcctcatcaccggaggaataatttatgatgttattgttgaacctccaagtgtcggttctatgactgatgaacatgggcatcagaggccagtagctttcttggcctacagagtaaatggacaatatattatggaaggacttgcatccagcttcctatttacaatgggaggattaggtttcataatcctggaccgatcgaatgcaccaaatatcccaaaactcaatagattccttcttctgttcattggattcgtctgtgtcctattgagttttttgatggctagagtattcatgagaatgaaactgccgggctatctgatg

SEQ ID NO: 223 - DNA, 386 bp, Homo sapiens
ggcacgaggcttcaagctactgcggaaatgcatcctgcagatgacccggcctgtggtggaggggtccctgggcagccctccatttgagaaacctaatattgagcagggtgtgctgaactttgtgcagtacaagtttagtcacctggctccccgggagcggcagacgatgttcgagctctcaaagatgttcttgctctgccttaactactggaagcttgagacacctgcccagtttcggcagaggtctcaggctgaggacgtggctacctacaaggtcaattacaccagatggctctgttactgccacgtgccccagagctgtgatagcctcccccgctacgaaaccactcatgtctttgggcgaagccttctccggtccattttca

SEQ ID NO: 224 - DNA, 593 bp, Homo sapiens
ggcacgaggattgcacacctaaaccttcgagatcatcagctgcctttcaaacatttaattggccaggttatgattgacaaaaatccaggaatcacctcagcagtaaataaaataaataatattgacaatatgtaccgaaatttccaaatggaagtgctatctggagagcagaacatgatgacaaaggttcgagaaaacaactacacctatgaatttgatttttcaaaagtctattggaatcctcgtctgtctacagaacacagccgtatcacagaacttctcaaacctggggatgtcctatttgatgtttttgctggggttgggccctttgccattccagtagcaaagaaaaactgcactgtatttgccaatgatctcaatcctgaatctcataaatggctgttgtacaactgtaaattaaataaagtggaccaaaaggtgaaagtcttcaacttggatgggaaagacttcctccaaggaccagtcaaagaagagttaatgcagctgctgggtctgtcaaaagaaagaaaaccctctgtgcacgttgtcatgaacttgccagcaaaagctatagagtttcttagtgctttcaa

SEQ ID NO: 225 - DNA, 477 bp, Homo sapiens
gtaagttcagcgcgcccgctccggccggccctgcgcctcccgccgcgcccgggatgtattcgtccccgctctgcctcacccaggatgagttccacccgttcatcgaggccctgctgcctcacgtccgcgccttcgcctacacctggttcaacctgcaggcgcggaagcgcaagtacttcaagaagcacgagaagcggatgtcgaaggacgaggagcgtgcggtcaaggacgagctgctgggcgagaagcccgaggtcaagcagaagtgggcgtcgcggctgctggccaagctgcgcaaggacatccggcccgagtgccgcgaggacttcgtgctgagcatcaccggcaagaaggcgccgggctgcgtgctctccaaccccgaccagaagggcaagatgcggcgcatcgactgtctccggcaggcggacaaggtgtggcggctggacctggtcatggtcatcctgttcaagggcatcc

SEQ ID NO: 226 - DNA, 299 bp, Homo sapiens
  modified_base (102): a, t, c, g, other or unknown
gccaaagctcaataccccattgctgatttggtaaagatgctcactgagcaaggcaaaaaagtcaggtttggaattcacccagttgcaggccgaatgcctggncagcttaatgtgctgctggctgaggctggtgtgccatatgacattgtgttggaaatggatgagatcaaccatgattttccagatactgatttggtccttgtaattggagctaatgacactgttaattcagcagctcaagaagatcccaactctattattgcaggcatgccagtccttgaggtctggaaatcaaagca

SEQ ID NO: 227 - DNA, 390 bp, Homo sapiens
gagtgaaggagttgaaacttttcttgttagtgtacaactcattttgcgccaattttcacaagtgtttgtctttgtctgaatgagaagtgagaaggtttttatactctgggatgcaaccgacatgttcaaatgtttgaaatcccacaatgttagaccaatcttaagtttcgtaagttatttcctttaagatatatattaaacagaaatctaagtagaactgcattgactaaccagtccctctggatggtggtgaacctgaagcatgctttaacctctaagactgtctaacacgcgtttcattcaatgtctccacagactgggtagcaaaaaaatcaccttttagttttagtttttaatctaaagatgttagacagatgctgagtgtgcgtt

SEQ ID NO: 228 - DNA, 423 bp, Homo sapiens
  modified_base (395): a, t, c, g, other or unknown
ttcctctgtcgggtgtggccaagtggggataaagagaagagcaacatctctaatgaccagctccatgctctgctctgtatctacttggagcacacagagagcattctgaaggccatagaggagattgctggtgttggtgtcccagaactgatcaactctcctaaagatgcatcttcctccacattccctacactgaccaggcatacttttgttgttttcttccgtgtgatgatggctgaactagagaagacggtgaaaaaattgagcctggcacagcagcagactcgcagcagatttcatgaagagaaactcctctactgggaacatgggctgttcgagacttcagtatcctcattcaacttggattaaaggtattttgatagttcatcctgttnctggcatgtatgtttggaagggaaggat

SEQ ID NO: 229 - DNA, 417 bp, Homo sapiens
  modified_base (321): a, t, c, g, other or unknown
  modified_base (400): a, t, c, g, other or unknown
tagaaaagaaaagaaaacttgaaactaatcctgatattaagccatcaaatgtggaacctatggaaaaggagtttgggctttgcaaaactgagaacaaagccaagtcgggcaaacagaattcaaagaagctgtactgccaagaacttaaaaaggtgattgaagcctccgatgttgtcctagaggtgttggatgccagagatcctcttggttgcagatgtcctcaggtagaagaggccattgtccagagtggacagaaaaagctggtacttatattaaataaatcagatctgggtaccaaaggaggatttgggagagctgggntaaattattttgaaggaaagatttgcccaacagtgggtgtttcagagcctcaaccaaaacccaaagggttaaagggggnggtttacccagggtttc

SEQ ID NO: 230 - DNA, 441 bp, Homo sapiens
  modified_base (228): a, t, c, g, other or unknown
cagtttcatgtatttgaatcgacaagacacctccctcgattctccatgtatgcgctgaccagcctggaccctgccagtgagccaatcagttatgttaactttaccattgcagaacgggcacagagggttgttgtatggctcggtcagaactttctgttaccagaagacactcacattcagaatgctccatttcaagtgtgtttcacatctttacggaatggcggccanctgcatataaaaataaaacttagtggagagatcactataaatactgatgatattgatttggctggtgatatcatccagtcaatggcatcattttttgctattgaagaccttcaagtagaagcggattttcctgtctattttgagggaattacggaaaggtgctagttaaggtggatgaatatcctttcagtgcattcagaagctccagtgctt

SEQ ID NO: 231 - DNA, 333 bp, Homo sapiens
  modified_base (311): a, t, c, g, other or unknown
  modified_base (324): a, t, c, g, other or unknown
ggtgtcccaggaagtcagccattactccccagtggaatggatccaactcgacaacaaggacatccaaatatgggtgggccaatgcagagaatgactcctccaagaggaatggtgcccttaggaccacagaactatggaggtgcaatgagacccccactgaatgctttaggtggccctgggaatgcctgggaatgaacatgggtccaggtggtggtagaccttggccaaacccaacaaatgccaatttcaattaccatactccttcagcatctcctggggaatttattgttaggtcctccagggaggttgangggccaccagggnacacccttc

SEQ ID NO: 232 - DNA, 402 bp, Homo sapiens
ccctttacacagactcacttgtcactcactgccatagagtacagccacagccacgacaggtacctaccaggtgaaacctttgtcctggggaatagtctggcccgctccttggaaccacactcagactcaatggactctgcctcaaatcccaccaaccttgtcagcacctcccaaaggcaccggcccttgctttcatcctgtggcctcccaccaagcactgcctcagctgtgcgcaggctatgctccagggggtcggaccgatacctgggagagccgcgatgcctcttcgactgagtggccgggaccccttccttcatgggacagttcgaggatgttgattgcagttttgttccggggaaggttgattcctcaggtttgggaccccaaggttgaacctgtttt

SEQ ID NO: 233 - DNA, 492 bp, Homo sapiens
  modified_base (376): a, t, c, g, other or unknown
  modified_base (381): a, t, c, g, other or unknown
  modified_base (386): a, t, c, g, other or unknown
  modified_base (393): a, t, c, g, other or unknown
  modified_base (421): a, t, c, g, other or unknown
  modified_base (427): a, t, c, g, other or unknown
  modified_base (450): a, t, c, g, other or unknown
  modified_base (486): a, t, c, g, other or unknown
tgggatcataaggagcccttaaatacttgttattgactggggttatttttatgctgtagcaaatgtgacaggctctttttagcaaaatttttgaaaatttttttggtattactctgaaacaaaatttaagttggagtttcagggatttagggagtagttttcattctacatgaactgaggtaatattatggtaactccaatatttggttaaaaaaactatacaaatcagaatagtactaaaatactgtaggaattttaggcatttttattttgcactttgtgtgggattgagggtgttcaggaaatacccaacccattaaaaatgtaatctagttgggccaaagggtgtgcggcttaaaacacgggaacccgaacntggcnttggnttggggntaactttttgaggggttttttgtccaanaggccntgtggaggagttaccatttttcnttaaaggttgggtgggtccccctgtccagagttctnggggac

SEQ ID NO: 234 - DNA, 321 bp, Homo sapiens
  modified_base (218): a, t, c, g, other or unknown
  modified_base (221): a, t, c, g, other or unknown
  modified_base (280): a, t, c, g, other or unknown
  modified_base (300): a, t, c, g, other or unknown
cgtggcactccaccagctctaccaatacacgcagaagtactatgacgagatcatcaatgccttggaggaggatcctgccgcccagaagatgcagctggccttccgcctgcagcagattgccgctgcactggagaacaaggtcactgacctctgacctacaatctccagtgctgccttgggacataggtacctgaggtacctgagagcccctcaggganggnggccgagtggctgtggctgaggcccccaccctcccctgggaacgcgccccaagccggantgggtgcagccggaacccgnccagcgttttagactgtagca

SEQ ID NO: 235 - DNA, 359 bp, Homo sapiens
gcttgctatgaagcagtgtgtgaatggacaatgttgaatgaatgtctggctcagtgatggagagccaggttcatctttgaaatctagggctcttcactcatgaagcagactcctagtcctggagtgactgtgtacgagagcgtggttgtggtgctgtatgtgaacgcatgcaagcttgattcaccttcagggggctgataacctagtaaatcatcaaaatgagatcataagtgttaatgtacactggacatgaaaacaaagactggtttagcagcagacattggtttactctgcagcctgtgttttctgtttccccctttcccacctccttccccccacccaatccttttttttttttt

SEQ ID NO: 236 - DNA, 306 bp, Homo sapiens
  modified_base (227): a, t, c, g, other or unknown
  modified_base (246): a, t, c, g, other or unknown
  modified_base (255): a, t, c, g, other or unknown
  modified_base (271): a, t, c, g, other or unknown
  modified_base (287): a, t, c, g, other or unknown
  modified_base (303): a, t, c, g, other or unknown
gtgatgatgggcagcctggtgtacctgcggctgggcttggagaagtcaccctactgccacctgctggacagcagccactgggcagagatctgtgagacctttacccgggacgcctgttccctgctggggctttctgtggagtccccccttagcgtcacttttgcctctggctgtgtggcgctgcctgtgttgatgaacatcaaggctgtgattgagcagcggcagtncactggggtctggaatcanaaggacganttaccgattgagattnaactaggcatgaagtnctggtaccactccgtnttc

SEQ ID NO: 237 - DNA, 395 bp, Homo sapiens
  modified_base (311): a, t, c, g, other or unknown
  modified_base (342): a, t, c, g, other or unknown
  modified_base (375): a, t, c, g, other or unknown
  modified_base (383): a, t, c, g, other or unknown
  modified_base (390): a, t, c, g, other or unknown
gtcaaaatattacagtagaatctgagtgtaatatgtgtaaccaaaatgagaaagaatacaagaaatgtttctggagctagttatgtctcacaattttgtagaatcttacagcatctttgataaacttctcagtgaaaatgttggctaggcaagttcagttaaaatatagtagaaatgtttatcctggtatctctaagtatacatttaattgtacagaaaatttacagtgtaacattgttcaacatttgcagattgactgtatatgaccttaatctttgtggcagcctgaaggatcagtgtagttaatgccnggggaaagtgcttttttacctaggacttccnttctcagcttctccccttaaagagacccctaantatggccnttttggntttgt

SEQ ID NO: 238 - DNA, 440 bp, Homo sapiens
  modified_base (356): a, t, c, g, other or unknown
  modified_base (367): a, t, c, g, other or unknown
  modified_base (387): a, t, c, g, other or unknown
  modified_base (410): a, t, c, g, other or unknown
  modified_base (423): a, t, c, g, other or unknown
  modified_base (432): a, t, c, g, other or unknown
gacaatccattaattccagctgcgtgcatagatcacatttttaaaatgtaaaaatgcaagcaaaaacagctgtaacaaagaaagtgtgctcaaggaccaaagatttaacagataaaaatacccaattagaagagatatagtagactatatgaagagagattatatttgttacacaccaatatacatcaaagtgcctgttgccttctgaaaatttgaagtggcaaaattattttatggtttaatgattattttattttatcagggactgcctcaagaagaaaataacataagcttgtggaatgggtgggagaaaatgccctattttttcttggcaaatacttgtattaaagttaacnttgttggatcntgatattatcctagggtacngtgtatgtgtgtattaattatanggtgtgtgtgtanattataccntttatata

SEQ ID NO: 239 - DNA, 507 bp, Homo sapiens
  modified_base (1): a, t, c, g, other or unknown
  modified_base (366): a, t, c, g, other or unknown
  modified_base (400): a, t, c, g, other or unknown
  modified_base (413): a, t, c, g, other or unknown
  modified_base (455): a, t, c, g, other or unknown
  modified_base (473): a, t, c, g, other or unknown
  modified_base (479): a, t, c, g, other or unknown
nggctcctatcagtgcacctgccctgatggttaccgcaagatcgggcccgagtgtgtggacatagacgagtgccgctaccgctactgccagcaccgctgcgtgaacctgcctggctccttccgctgccagtgcgagccgggcttccagctggggcctaacaaccgctcctgtgttgatgtgaacgagtgtgacatgggggccccatgcgagcagcgctgcttcaactcctatgggaccttcctgtgtcgctgccaccagggctatgagctgcatcgggatggcttctcctgcagtgatattgatgagtgtagctactccagctacctctgttcagtaccgctgcgtcaacgagccagggccgtttnttcctggccactgcccacagggtttaccagctgntgggccaaaaggnttttgccaagaacatttgattgagtgttgagtttggttgcgnaacagtggttccgagggnccaaantttgttaaatttccatgggggttaacgt

SEQ ID NO: 240 - DNA, 369 bp, Homo sapiens
  modified_base (54): a, t, c, g, other or unknown
  modified_base (295): a, t, c, g, other or unknown
  modified_base (314): a, t, c, g, other or unknown
  modified_base (324): a, t, c, g, other or unknown
  modified_base (331): a, t, c, g, other or unknown
  modified_base (339): a, t, c, g, other or unknown
  modified_base (348): a, t, c, g, other or unknown
  modified_base (356): a, t, c, g, other or unknown
  modified_base (368): a, t, c, g, other or unknown
gagacagatggcccaccaggagctgttgctctggttgccttcctgcaggccttngagaaggaggtcgccataatcgttgaccagagagcctggaacttgcaccagaagattgttgaagatgctgttgagcaaggtgttctgaagacgcagatcccgatattaacttaccaaggtggatcagtggaagctgctcaggcattcctgtgcaaaaatggggacccgcagacacctagatttgaccacctggtggccatagagcgtgccggaagagctgctgatggcaattactacaatngcaaggaagatggaacatncaagcacttnggttgancccatttnaacgatctntttctttngcttgcgaggang

SEQ ID NO: 241 - DNA, 248 bp, Homo sapiens
  modified_base (52): a, t, c, g, other or unknown
  modified_base (205): a, t, c, g, other or unknown
aatctaattcaaattgtcaaagctacaaaaggggggaagacatctgtattanttttgctaagtcacaacatcctaaaacaaaatactactactgtcagcagatccattatacacatttctgatgaaatccattagaacaataaaaatttcatcttgagaaatagccacaatgaaagtaatttacacaatataaaacaatgacagntctacagatgcagttgctcatgagtttacacatgcatacacaa

SEQ ID NO: 242 - DNA, 288 bp, Homo sapiens
gtttccaaaattcactgtacatgatcagtttggtgttcttgtaccacagtttttaactgaaggaaccagttgtaacagtctcaattttaactaaaacttgaagaactaaaacaacaatgcaaacctttcagcattgtttggccaaacttgttaaaactgtaatgcaagaaccaaatgcactgtgatgtggcaccaactaattagcaagcatgahtttytcacccaagagtgaaaaarggaaaatctaccatggcttgaagttaaagrgcagamctcctgactaccatt

SEQ ID NO: 243 - DNA, 423 bp, Homo sapiens
  modified_base (25): a, t, c, g, other or unknown
  modified_base (38): a, t, c, g, other or unknown
  modified_base (52): a, t, c, g, other or unknown
  modified_base (125): a, t, c, g, other or unknown
  modified_base (302): a, t, c, g, other or unknown
  modified_base (364): a, t, c, g, other or unknown
  modified_base (406): a, t, c, g, other or unknown
aaagagttaaggaaggcaggttgtncttctattcaggncactcttcgttttncatgtactgcatgctgtttgtggcactttatcttcaagccaggatgaagggagactgggcaagactcttacgncccacactgcaatttggtcttgttgccgtatccatttatgtgggcctttctcgagtttctgattataaacaccactggagcgatgtgttgactggactcattcagggagctctggttgcaatattagttgctgtatatgtatcggatttcttcaaagaaagaacttcttttaaaganagaaaagaggaggactctcatacaactctggcatggaaacaccaacaactggggaatcactntgccgagccaatcaccagccttgaaaggcagccagggtgccnaggtgaagctggcctgt

SEQ ID NO: 244 - DNA, 460 bp, Homo sapiens
  modified_base (457): a, t, c, g, other or unknown
ccaacagtatctcctgcatcaaacgcctctctgggctcctcaaagtccttgatatcatgcccttgaccctgcatgcctgtatgcaccagaagcagaggctcagaaacctggagcagtttgcccgtctggaagactgtgttctcttggcaacagatgtggcagctcggggtctggatattcctaaagtccagcatgtcatccattaccaggtcccacgtacctcggagatttatgtccaccgaagtggtcgaactgctcgagctagcaatgaaggcctcagtctgatgctcattgggcctgaggatgtgatcaactttaagaagatttacaaaacgctcaagaaagatgaggatatcccactgttccccgtgcagacaaaatacatgggatgtggttcaaggagcgaatccgttttagctcgacagatttgaggaatctgagtattcggaactttccnggt

SEQ ID NO: 245 - DNA, 2533 bp, Homo sapiens
ccaagcccatgagggccgcgcgcccggccgccggtgctgacgagacggagctcctggcccccgaggaggagcagaggatcaatgcggttcaagaatcgattccagcggttcatgaaccatcgagctccagccaatggccgctacaagccaacttgctatgaacatgctgctaactgttacacacacgcattcctcattgttccggccatcgtgggcagtgccctcctccatcggctgtctgatgactgctgggaaaagataacagcatggatttatggaatgggactctgtgccctcttcatcgcttctacagtatttcacattgtatcatggaaaaagagccacttaaggacagcggagcattgttttcacatgtgtgatagaatggttatctatttcttcattgctgcttcttatgctccatggttaaatcttcgtgaacttggacccctggcatctcatatgcgttggtttatctggctcatggcagctggaggaaccatttatgtatttctctaccatgaaaaatataaggtggttgaactctttttctatctcacaatgggattctctccagccttggtggtgacatcaatgaacaacaccgatggacttcaggaacttgcctgtgggggcttaatttattgcttgggagttgtgttcttcaagagtgatggcatcattccatttgcccacgccatctggcacctgtttgtggccacggcagctgcagtgcattactacgccatttggaaatacctttaccgaagtcctacggactttatgcggcatttatgaccaatctgtactaattctccaaaccagtattatttcaattatggcacttgggagtggggtgagagctaaacattgcacagggcaaagaaaaaaaataactgcactgactttatatcttttgaatataattactgtgaaagtataaaggctgtgttctggaattttctgcctcacagcaaataaataaggtagtgaattaattattcattccattccactatcatgaaggactctgaatagacttggccaactgatgtttacaaaccagacttttatattttaattttacagattttactacatgatttttctaaattactatgtcaggttgtaaaagtcagtgcaataacaaaccttcctttttaagaagaaaattgtttctattactttcccattcactaggtaaagaatcatggacagaacttacactactttttaccatgtttcatcttggcataacatggttcttttttaaatagaaactttagttttttgtaaatttttaaaaaaatatttcattgatatgcatctctgcaggtcctcattcatgttgtaaatttttggagcaagcagtcaacattccacaaacgaacaaacattatacctcttctgatagttttattaagcatggagaaattgccaatttttaaaaactgcagttttccaaacttttctgccaacctcttactctgaattcagtgctgctttgggacatatacttgacctagcttggtttaccagtgatggaaaagtattttgatatcattaactttttcaaaagatccaactttttctctatgcctttgccacattctcttcagggtctctttccacagcggataaatgttttttctgtattatgacagtattgttgtgatggccatctgctggaaactcctgaagagcattatgtattacagtgagcagttgtattgcctgtttggtgcccaatggttaagtcattgtcacttagctttatattgtcagtttgatatttattttaaattgtggaactagatgcataaattcacatttctgcctttcctttgcatcttctcatatattgtgttttttttttttttcctagaaaaaatatttaaagcattgtttgacaggtagaaactcatgtatctgtagtccatgagttatatcctggctcagtggagtgatatttatgtattatttttacttttctctcagtgtcttatattaagattaacatgttgttaatagttgctttgttgattaatctctcttgttggtgttttaataaatgaaataggcttgcctttagatcgggtgctgatattgcctgtttcctagtaatgggctgatcaaatgatcagtggaattcttggtttgatgataaccttattaattgaaattttttactgatgtggctttaaaagaggtttattttgtatatgtttagaactctctgattttgatgaattatatgggagtgagaaacagaagaagtggtatttgctggcgagttaaataggcaaggtacccagtgataacaccaaccaaaccactcctatctgcatgattctgaacatctggatgcctgttgttttactgtgtatattttatttttaatatattaactttgtggattcatttaaggtctactcaaaagtaacactgtccaaaccactaatatgtatgtaaaaattgtgctgtatactacaataaagttgttacttggatttgttccaaaaaaaaaaaaaaa

SEQ ID NO: 246 - DNA, 6072 bp, Homo sapiens
ggtggtcggcggggaggcccccgcgctttaaaataatgcccgcggcgcccgcgcgaccatgcaatggcgagcgctcgtcctggggctggtgctcctccggcttggcctccatggagtattgtggctcgtcttcgggctggggcccagcatgggcttctaccagcgctttccgctcagcttcggcttccagcgtctgaggagccccgacggccccgcgtcgcccacctcggggcccgtgggccggcctgggggggtatccgggccgtcgtggctgcagccgccggggaccggggcagcgcagagcccgcgcaaggctccgcggcgtcctgggccggggatgtgcggcccagccaactggggctacgtgctgggcggccggggccgcggcccggacgagtacgagaagcgctacagcggcgccttccctccgcagctgcgtgcccagatgcgcgacctggcacggggcatgttcgtctttggctacgacaactacatggctcacgccttcccccaggacgagctcaaccccatccactgccgcggccgtgggcccgaccgcggggacccttcaaatctgaacatcaatgatgtactagggaactactcattgactcttgttgatgcattggatacacttgcaataatgggaaattcatccgagttccagaaagcagtcaagttagtgatcaacacagtttcatttgacaaagattccaccgtccaagtctttgaggccacgataagggtcctgggaagcctcctttctgctcacagaataataactgactccaagcagccctttggtgacatgacaattaaggactatgataatgagttgttatacatggcccatgacctggcggtgcggctcctccctgcttttgaaaacaccaagacagggattccatatcctcgggtgaatctaaagacaggagttcctcctgacaccaataatgagacatgcacagcgggagccggttccctcctggtggaatttgggattctgagtcgactcctgggggactccacatttgagtgggtggccagacgagcagtgaaagccctttggaacctccggagcaatgatacaggattactaggcaatgtcgtgaacattcagacgggccactgggttggaaagcagagtggcctgggtgccgggctggactccttctatgaatacctcttgaaatcttacattctctttggagaaaaagaagacctagaaatgtttaatgctgcatatcagagtattcagaactacttaagaagagggcgggaagcctgcaatgaaggagaaggagaccctccactctatgtcaacgtgaacatgttcagtgggcagctgatgaacacctggattgactctctgcaggcctttttccctggactgcaggtgctgataggagatgtggaagatgccatctgccttcatgccttctactatgccatatggaaacgatatggtgccctccctgagagatataactggcagctgcaggcccctgacgttctcttctacccactgagaccagagttagtggaatccacatatctcctctaccaggcaaccaagaatcccttctacctccatgtaggaatggatattctgcagagtctggaaaagtacacaaaagtcaagtgtgggtacgccacgctgcatcacgtcattgacaagtccacagaagaccggatggagagcttctttctcagtgagacctgtaaatatttgtatctgctgtttgatgaagacaatccagtacacaagtctggaaccagatacatgttcacaacagagggacacattgtatctgtggatgagcatcttcgggaattgccatggaaggaattcttctctgaagagggagggcaggaccaagggggaaagtctgtgcacaggccgaaacctcatgagttaaaagtcatcaactccagctccaactgcaatcgtgtacctgatgagaggaggtactccctgcccttaaagagcatctacatgcgacagattgaccagatggttggtttgatttgatctgctctctgtgaggcctcatcttgaaccagaccttaacgaccaaacccagaccatgccaaagtccagtctgaaatgaaaggggacagaagtcttgctgtccatggtggtgtaggaatttctgtgcaacacctcaccacgtctggttaatccttgcacacttcagtgtttctctcctgttcaataaaatgccctgttaaggatataatttgaagtgagaagatacatggaaattgccctcttatgacatgttgatgttataagcacaatagatggggcatctttggattgatgttcacagctttatacttcagaacctaagtctcttcactttgctggcacctgctatactggagtattgctatgtctttaaaaaatttttttttattatattttatttttttgagacagggtcttgatatttttttgggacagggttacctgggctcaagtgatccttctgcctcagcctcccgagtagctgggattacaggtgagcaccactgtacctggctagctacttctttgttagaggattgagaatgaaatttctgcaaaagggcccatggttcatttggtatccctatttaattgcattgaaaatgtcatcctttctgttgttagataattggggtcttcccctgatatccaaccgtgattttggatcacatgggagaaaaagtcatccagtttttcatgtttgcctcaagtaatctttacagtgttacaaattatttgcttaagaagaatggtcttaaccagaattcttaacagatagtctcttaggttattatgttatggtctaagaggttaactgacatcttttggatggtattttgcattttgaatatgaacttacctgaggaactcccatagttccagaatcaggtgccttttagggagagaacaatacctaagattgtctgagcttccatctttctcatatttcctaagcaaggattctcacttatgaccatatttgggttagagttctgttttgtttctgttttctgtgtctagtgccaattagctaaatcagggagaaagaaatgatcacatgacttttagcatccttgagccatttctctgtgtaatacaggctttagattagtgccttatattggttttggtttggggcactggatgtcgcagctactgctatggtttcaggaggcctgtttagccacatggtgagaccgtggtgaaagggggatggaaattgcttggccagtctttgcctttcatcctgtaaaagtaagcatgtagaaggaggaagttgtgctaaaatgcctttgtttttttgttattattttcttagccagaacatctctctttgaactcacactgatacacacctgctactcttacacagtgcagcagggctgactcttagtctggcttccatgaagcgtcatgggtggaaacgcattctagtaaaaaaggtaggaaatccctaaaacttccagcctcacatagcacggttctcacctgtcactgttttcccacctctaaggatttcatgtacatcttttcaaagctagaaataagcactgtctaagtttatgttgcatttttagtcaaaagggagaaatcttattccttcttgaaaattttaagtgttatggttttatatagttcagttctttgagatttttgaaaagagtattttcagtaataaacgtgccatctctatctcttaaacatttattacaacaattgttttaaaatagaaaaaataaaatgcttctattttaccttttttcatttcagaagcattattctgtttattaacagtgtcccatctactgaatagaaaactttgagaataatatatatatatattttaaatgttttcactgactcattgaaaatgttaattacacacacatgcatgcatgcacacacgagcatacttgtacctttgtctctgggcaaacaggtgggactgttagtgacccatttgggaaaatagagcatctcagagaaggaggtgagttcttcctgcctgtgatttctcttggcgctcccctcctctcccgctctggcttctgtggcggcagtggtgggtaagcactccagtgttctcttaatgaggcactttgcctgtcactcgagcaagcctgggtgttccttcctcctcatgctcctggaatagggaatagggatctcatgcttgcaaactacacaatgctgcaggtgcttcccaggggccacaggctgtcaggaaacgtgttttatgttaagtcacaaacccacttgacttctgggtactggaattaataccagtgggtgagactgagggtgagtgagttagtacatattaatcctggttgttgagcttccagactaccccgtccaaagtttgatgctatgtagtcagtggtttgtggggctggatgccagaaggttctttgagccagtttcaaaggttacttgtttttttttttttttttttaagtcagaatgttaacagctgtgatatatcctgcagggcttttgcagtttcttctgttctgtgttctgaaatcctgggtagagaatggctgaggaggagattaccagagaagttgctttgctcagtgctttgccccaggattgcctcaaatctgagtggacttcatcctttgcggcggctctgagcctggcccatcttcctattcccacgtgtagctagtgtctagtgtcagctttgctcaatgtggtggaaacattttgcagaactgttgtagaaagctgccttatagttggcttgacaaagcataattctctcataacaaactttcaaatcattacagtagcttagctactttagttgatgtgaccgaggaatcccttctagaatcataggtggcaagggagggtttgctagctctccatttgcactggccattgtgaaaaaccagcttctgtattcaaatctttccttcatttttttaaattttttttttggcagcgcttgtgctggaacttactcattgtaactgaatcctcagggcttttcttgttttagatcatggactgtgcacgtgacacttaaataattttctatgtatttaaagaaaaatgcaccaggatggtgtctgtgcacgtgactattagaggagcgtctgtagaagtacctggtttggtcagtgcagttgtgcaatctgagggccttgtttcctcctcccctttccccttctccccaccaaaggaaaatatccctcttaatgatttcgtagttcagtttactgaatgattaccacctgtaattcctctttggattgtgtagactcaacatgagacattcctttctgctttctggagggcaccaggggcctttctctttgataaattttttttgtctgttgacaaaaacaaaaatcttttttcaaatgtagtgctggtgaaaaggtagggctgagtgattaccttagccacagggtggctgagcaggaactttagaagaaaatcctgagctttcctgtccattcccagcatccagctcctattctagtgcctcttccctgcagggcagggaccccttgggaaatcgaggaggtgggacgggctgggccctgtgtcccaggtttcacagggctcagggttatgctcccgcttgaatctggacgtgaatctggtaaaaatatcaagtacctgtggaactccctgattctataccctcttccttctttctgcaaggcagaggaataatatttttaaaggttattttgttttagttttaaatagcaaaacacaagctgcatttttatttattttgcataagaaaggtaaatctttttacaaaaaaaagtatagagttggaaactctgggaaaacttacggaaatacacaaatgcttctctgtaatgtgcaatatgctttgcaactgtagatgatattttatgtttaatctgtaaataagaaatgtatttaaattaaaagggatctttttgtaaaaggaccaaatgttcttttataaatgtaataaggaatatcttgctctttaaaatttattaggatttttatgagtaatttttattaaaagatttctttttttg

SEQ ID NO: 247 - DNA, 5615 bp, Homo sapiens
gaaactgcgggtgtgacccccccgtggtggctctgggtgtctgcggaggagctgggggcggaagatgaggctaacggcttggcttcagtgaacgcaccgggatgtgcaggccgggaggtagaggcaggctgatgggggagggaacgagcagcctgtgagacggggtgacggcggctaccagcccgggcgggcaccgggactggaagagttgcctgagcagccggctggtccggcggccaggctagggcgggggcgagcgcccagttgagcctgctggggctggaggagcgagaagggttttcttcacatttcagagcgaaccagacggggacagtaaggtttggaggaagggggatcgttggaagtagcaagaagtggagagaatctggcaatagacgagaaaccgaaagaatcagaaagaagtctatgtgagtagctgaaagcattgggtgaccagaaagaaggtcggtgtaagtgaaggaagagtgaggtgtggctggatcaaagggctaagagaagcgggtctgtgtaagtggatgtgagtgaggatcaaggaaaagccgtggaagtggccgggggtcggggccgcagaagtgccagacggggccggaaagcagccgagcggagttcaaatttgagagcgtttggaaattggaagacttggtggcgaacgagggtcaggacctgcatcctgcctcagagagttatcgacgtatccggaatgtgggatcagaggctggtgaggttggccctgttgcagcatctgcgggccttctatggtattaaggtgaagggtgtccgtgggcagtgcgatcgcaggagacatgaaacagcagccacggaaatagggggtaaaatatttggagtaccttttaatgcactgccccattctgctgtaccagaatatggacacattccaagctttcttgtcgatgcttgcacatctttagaagaccatattcataccgaagggctttttcggaaatcaggatctgtgattcgcctaaaagcactaaagaataaagtggatcatggtgaaggttgcctatcttctgcacctccttgtgatattgcgggacttcttaagcagttttttagggaactgccagagcccattctcccagctgatttgcatgaagcacttttgaaagctcaacagttaggcacagaggaaaagaataaagctacactgttgctctcctgtcttctggctgaccacacagttcatgtattaagatacttctttaactttctcaggaatgtttctcttagatccagtgagaataagatggacagcagcaatcttgcagtaatatttgcaccgaatcttcttcagacaagtgaaggacatgaaaagatgtcttctaacacagaaaagaagctacgattacaggctgcagtagtacagactcttatcgattatgcatcagatattgggcgtgtaccagattttatcctggaaaagataccagccatgttgggtattgatggtctctgtgctactccatcactggaaggctttgaagaaggtgaatatgaaactcctggtgaatataagagaaagagaagacaaagtgtaggagattttgttagtggagcactaaataaatttaaacctaacagaacaccttctattacacctcaagaagaaagaattgcccagctatctgaatcaccagtgattcttacaccaaatgctaagcgtacattgccagtagattcttctcatggtttctcaagtaagaaaaggaagtccatcaagcacaattttaactttgagctgttgccaagtaatctcttcaatagcagttctacaccggtatcagttcacatcgatacaagctcagaagggtcatctcagagttcactctctcctgtactcattggtggaaaccatttgatcactgcaggtgtgccaaggcgaagtaaaagaattgcaggcaaaaaagtttgcagagtggaatcaggaaaagcaggctgcttttctcctaaaatcagccataaagaaaaggttcgaagatctctgcgtttgaaattcaatctagggaaaaatggcagagaagtaaatggatgttctggtgtcaatagatatgaaagtgttggttggcgacttgcaaatcaacaaagtttaaaaaatcgaattgaatctgtaaaaacaggtttgctttttagcccagatgttgatgaaaagttaccaaagaaaggttcagaaaagatcagtaagtctgaggaaaccttactaactccagagcgactagttggaacaaattaccggatgtcttggacaggacctaataattcaagttttcaagaagtagatgcaaatgaagcttcttcaatggtggaaaatcttgaggtagaaaactctttggagcctgatattatggtagaaaagtcacctgctacttcatgtgaactcaccccttccaatttaaacaataagcataatagcaacataacaagtagccctcttagcggggatgaaaataacatgaccaaagagactttggtgaaagttcaaaaagcgttttctgaatctggaagtaatcttcacgcattgatgaatcagaggcagtcatcagtaactaatgtggggaaagtaaaattaactgaaccatcttatttagaagatagcccagaggaaaatctatttgaaactaatgatttgactatagtagaatcaaaggagaaatatgaacaccacactggtaaaggtgaaaaatgtttttcagagagggacttttcaccccttcaaactcaaacatttaatagagaaacaactataaaatgttattcaactcagatgaagatggaacatgaaaaagacattcattcaaatatgccaaaagattatttaagcaagcaagaattctccagtgatgaagaaataaagaaacagcagtccccaaaggataaactaaataataaattaaaagagaatgagaatatgatggaaggtaacttaccgaagtgtgcagcacatagcaaggacgaggctagatcctctttctcacagcagagtacatgtgttgtaacaaacttgtcaaaacctaggcctatgagaattgctaaacagcagtcattggaaacatgtgagaaaacagtttctgaaagttcacaaatgacagaacatagaaaggtttctgatcacatacagtggtttaacaagctttctttaaatgaaccaaatagaataaaagtcaagtcacctcttaagtttcagcgtactcctgttcgtcagtccgtcagaagaattaattctttgttggagtatagcagacaacctacagggcataagttggcgagtcttggtgatacagcttctcctttggtcaaatcagtgagctgtgacggtgctctttcctcttgtatagaaagtgcatcaaaagattcctctgtttcatgtatcaaatcaggtcctaaagaacagaagtccatgtcatgtgaagagtcaaatattggtgcaatttcaaagtcaagcatggagttaccctcgaaatctttcttaaagatgaggaagcacccagattcagtgaatgcttctcttaggtctactacagtttataaacagaagatcttatctgatggccaagttaaggttcccttggatgatctgactaatcatgatatagtaaaaccagttgtaaataacaacatgggcatttcttctgggataaataacagggtccttaggagaccatcagaaagaggaagggcctggtacaaaggttctccaaaacatcctatcggaaaaactcaattactaccaacaagtaaacctgtagatttgtaattggtaaatgttatacttgtcattaatgtaaataaagtgagtaattggtatgacttgcaggatgatgtacatgttagtttgtagctcaggatgattgttaagcaatagatttgctctattgaaaatgtttcatttttttcactgtacaagcaacttagatttttatttgtacaaattacttctttgtttttcttaatgatggcaatttttaaactttaattttattgtgatctcttaaagcagaggttagactttacctttctgactctgtcgtccaggctggagtgcagtggcgcaatctcactgcaagctccacttcctgggttcatgccattttcctgcctcagcctcccgagtagctgggactacaggtgcccgccaccacgcccagctaattttttgtatttttagtagagacggtttcaccgtgttagccaggatggtctcgatctcctgaccttgtgatccgcccgcctcagcctcccaaagtgctgggattacaggcatgagccaccacgcccggctagactttacctttctaaagaaattgtttactggatttataagaagttaatttttgaaaatgacatatttttgtgtgatagaaagaatggagcaagttgtgcctatttcctccaagtcagataaggtttctaaaataaataaatttctagcatataaagggtagagataaactctgcaaatcttatgtctggaattatattaatgtttattgtccttgccaaaattcctagaaattaatttccttcaatagcatcctaaaactctatttttatttggggcagagtaatttcatttatagtgccagtaggtgtaccttgtgttcactcgaactaagaacaatggttaaggcagaataatgactaaaatatgttcatatattatgatgtggaaataattgataacttttaagccatactatgtttttaaagataatttgcacaaacacgtttgtgtctgttctgtccaatatagatttggcaattatttaaagagggataatcttgaaaaaaattaaccaaggtgatttcttatatgtagatgctcgattttggaatttgaaatagtagatgcacctctttaccttttttacttggataaaaacctatgatgattttgtcctgtgtgtaaatgttatttatttagcatagacattaaagataactctctggaaaatgacttgactaaggctctcatgaaattcaaagtgccatttagaacatgcaccaaattgtcaagtaaatctgtctaaatttatattttaaattattacaaattacacatctttgaggaaagagtattatgaacaatagaacatattctctaggttgtagaggaaggaataagcagacagaatcaaccactaaaggtagtttttcagattggttgttagaatgtcatgtttagatgttggagcagattagagcagcattcatgccactcggagcaaccagacttacagcataagtatgtacgaggaatttcaaatcatcagatgtttgcttggctaggttctactttgtttatttgatatcaaataggtttgtagatgtttatggcatttctaattgtaagtagagacaaaatattcatatagtcagatatatgttgtctgctttaaacaatttttaaattttaaaaatgcattaacgtctttttatatccatcaagggaaggatgaaatgttgaatttgaagactaattcagtaagaagtcctaggggtttaactgtacatactacctgaactggcttttctgagagatgaatcaataatgaaacatgtctgttttaaaaactacc

SEQ ID NO: 248 - DNA, 5298 bp, Homo sapiens
ggcgcccgaccccagccaccgccctgcggccagcgcgtcccccgactcgccgcccggagaccccgaggctccaacgagttcagaaatgtccagaaatgacaaagaaccgttttttgtgaagtttttaaagtcttcagacaattccaaatgtttttttaaagctctcgagtccataaaagaattccaatcagaagaatatcttcagattattacagaagaagaggcattgaagataaaggagaatgatagatcactttatatctgtgacccttttagtggcgttgtctttgatcacctcaaaaagcttggctgcagaattgttggtcctcaagtagtcatattttgtatgcaccaccagcgatgtgtcccaagagccgaacatccagtttataatatggttatgtctgatgtaaccatatcttgtacaagtctggaaaaagaaaaaagggaagaagttcataaatatgtacaaatgatgggcggacgagtatacagagaccttaatgtatcagtaactcaccttattgcaggagaagttggtagcaaaaaatatttagttgctgcaaacctgaagaaacctattttgcttccctcttggataaaaacactttgggagaagtcacaagagaaaaaaataactagatatactgatataaacatggaagatttcaagtgtcctatttttcttggttgcataatctgtgtgactggcttatgtggcttagacaggaaagaagttcagcaactcacagttaagcatggaggtcaatacatgggacaattgaaaatgaatgaatgtacacacctcattgtgcaagaaccaaaaggtcagaagtatgagtgtgccaagagatggaatgtacactgtgtgaccacacagtggttttttgacagtattgagaaaggtttttgtcaggatgaatccatatacaagacagaacctagaccagaagcaaagactatgcccaattcttcaactcctaccagccagatcaacacaattgatagtcgtactctttcagatgtcagcaatatttccaacataaatgcaagttgcgtaagtgaatcaatatgtaattcacttaacagcaaactggagcctacacttgaaaatctagaaaatctggatgtcagtgcatttcaagcacctgaagatttattagatggttgtcggatatatctttgcggttttagtggcagaaagctagataaactgagaagacttattaacagtggaggtggagttcgttttaaccagctaaatgaagatgtaactcatgttattgtgggagattatgatgatgaattgaagcagttttggaataaatcagcccacaggcctcatgtagtgggagcaaagtggttgctagagtgtttcagtaaaggttatatgctttctgaagaaccatatatccatgctaattaccagccagtggaaattccagtttcacatcagcctgaaagtaaagcagctcttttaaaaaagaagaacagcagcttctctaagaaagactttgctcctagtgaaaagcatgagcaagctgatgaagatctgctctctcaatatgaaaatggtagctccacagtagttgaggctaagacgtctgaagccaggccctttaatgattctactcatgctgagcccttgaatgattctactcacatttctttgcaagaagaaaaccagtcttctgtcagtcattgtgtccctgatgtttctacaattactgaagaaggcttatttagccaaaagagtttccttgttttgggttttagtaatgaaaatgaatctaacatcgcaaacatcataaaagaaaatgctgggaaaatcatgtcccttctgagcagaactgttgcggattatgctgtggttcctctgctggggtgtgaagtggaagccactgtgggagaagttgttacaaatacatggctggttacttgcatagactatcagactttgtttgatccaaagtcgaatcctctcttcacaccagttccagtaatgacaggaatgactcctttagaggattgtgttatttcatttagccagtgtgctggagcagaaaaagagtctttaacattcctagcaaacctccttggagcaagtgttcaagaatactttgttcgcaaatccaatgcaaagaaaggcatgtttgccagtactcatcttatactgaaagaacgtggtggctctaaatatgaagctgcaaagaagtggaatttacctgccgttactatagcttggctgttggagactgctagaacgggaaagagagcagacgaaagccattttctgattgaaaattcaactaaagaagaacgaagtttggaaacagaaataacaaatggaatcaatctaaattcagatactgcagagcatcctggcacacgcctgcaaactcacagaaaaaccgtcgttacacctttagatatgaaccgctttcagagtaaagctttccgtgctgtggtctcacaacatgccagacaggtcgcagcctccccagcagtaggacaaccacttcagaaggagccctcgttacacctggatacaccatcaaaattcctgtccaaggacaaactcttcaagccttcctttgatgtgaaggatgcacttgcagccttggaaactccaggacgtcccagccaacagaaaaggaaaccgagtacgccactctcagaagttattgtcaaaaacttgcaacttgctttggcaaatagctctcgaaatgctgtcgctctttctgccagccctcaactgaaagaggcccagtcagagaaggaagaagccccaaagccacttcacaaagtagtggtatgtgttagtaaaaaactcagtaagaagcagagtgaactaaatgggatcgcagcctctctaggagcagattacaggtggagttttgatgaaacagtgactcatttcatctatcaagggcggccaaatgacactaatcgggagtataaatctgtaaaagaaagaggagtacacattgtttccgagcactggcttttagattgtgcccaagagtgtaaacatcttcctgaatctctttatccacatacttataatcccaaaatgagcttggatatcagcgcagtgcaagatggccggctctgtaatagtcgactactctcagctgtgtcttcaacaaaggatgatgagccagatcctttgattttagaagaaaatgatgtagacaatatggccaccaataataaagagtcagcaccatcaaatggaagtggaaagaatgactctaaaggagttctgacacagaccttagagatgagagagaactttcagaagcagttacaggagataatgtctgcaacatcaatagtgaaaccccaagggcagaggacttccctttcaagaagtggttgtaacagcgcatcttcaacccctgacagcactcgctctgctcgcagtggacgaagtagagtcctagaggcactgaggcagtctcgtcagacagtacctgatgtcaacacagagccttcccaaaatgaacagatcatttgggatgaccctacagcaagggaggagagagcaaggcttgccagcaatttgcagtggcctagttgtcccacacaatactctgagcttcaggttgacattcaaaacttggaggattctccttttcaaaagcctttacatgattcagaaattgctaaacaggctgtctgtgatcctggaaacatacgtgtgactgaagctcccaaacacccaatctctgaagaactggaaactcccataaaagacagccacctgatccctacgcctcaagcccccagtattgcctttccactcgccaacccccctgtggctccgcaccctagagaaaagattataacgatagaggagactcatgaagaattaaaaaaacagtacatatttcagttatcatctctgaatcctcaagaacgtattgactattgtcatctgattgagaaactaggtggattggtgatagaaaagcagtgctttgatcccacctgtacacacattgttgtgggacatccacttcgaaacgagaagtatttagcctcagtggcagctgggaagtgggtgcttcatcgctcctaccttgaagcctgcaggactgctggacacttcgtgcaggaagaagactatgaatggggaagtagttccatacttgatgttttgactggaatcaatgtacagcaacgaagactagcacttgcagcaatgagatggagaaaaaaaatccagcaaagacaagaatctggcattgttgagggagcatttagtgggtggaaggttattttacatgtggatcagtctcgagaagcaggcttcaaacgccttcttcagtcaggaggagcaaaggtgctacctggtcattctgtacctttatttaaagaggccacacatcttttttctgacttgaataaactgaaaccagatgactcaggagttaatatagcagaagctgctgcccagaacgtgtactgcttgagaacagaatacattgctgattatctcatgcaggaatcacctcctcatgtagaaaattactgtctaccagaagctatttcatttattcagaataataaggaacttgggactggattatcacaaaagaggaaagctcctacagaaaaaaataaaatcaaacgacctagagtacactaatcgcatctaccctttagttaccaaacattaaatgtttttaaaaattgaaagcctgaatgtgactgtgatagatttgggtagtaatttaaagatgagtacctgaagaattctgcttcagagtataatgatgacccttcttgagttttgaacacctgaaattgtaatcactgaaatattaactgtttcttaataaaaagttacctgaaataacaacaaaatacaactcctcagctagcttgctgttaaaccacattgaagtctgttaaaagatatttatttttcttgtaaatatctgaagctgtagcttagtggaaattttagcaaggtaatggattttgctttaaaatgtctgccttacaaattcataacaacaagatttgtcagtcagcatttattcatgttttccctgatttttatcttctcaccattttacctcttttaacaggagcctgagcacaaggtttaatgaggaagctggggctataaatatgtgtgtatatatgtatatgtatgtttgtacaaatctccatgatgtttgccaagtttgaatgcgcaaaacttggaaaatgtgacaataaagaataaaagtagtaactcaaattagtattaagatgtgtttacatagataaattttttaaaagagc

SEQ ID NO: 249 - DNA, 1584 bp, Homo sapiens
gcgcctcggcctagcatgtcggaagcgggcgaggagcagcccatggagacgacgggcgccaccgagaacggacatgaggccgtccccgaagcgagtcgcggccggggctggacgggcgccgcggcggggctggaggcgcgaccgccgcgcccccgagcgggaatcagaacggcgccgagggaccagatcaacgccagcaagaacgaggaggacgcgggaaaaatgttcgttggtggcctgagctgggatactagcaaaaaagatttaaaagactattttactaaatttggagaggtcgttgactgtacaataaaaatggatcccaacactggacggtcaagagggtttgggtttatcctgttcaaagatgcagccagtgtggagaaggtcctagaccagaaggagcacaggctggatggccgtgtcattgaccctaaaaaggccatggctatgaagaaggacccggtcaagaaaatcttcgttgggggtctgaatcctgaaagtcccactgaggaaaagatcagggagtactttggcgagtttggggagattgaggccattgaattgccaatggatccaaagttgaacaaaagacgaggttttgtgtttatcacctttaaagaagaagaacccgtgaagaaggttctggagaaaaagttccatactgtcagtggaagcaagtgtgagatcaaggtggcccagcccaaagaagtctatcagcagcagcagtatggctctgggggccgtggaaaccgcaaccgagggaaccgaggcagcggaggtggtggtggaggtggaggtcagagtcagagttggaatcagggctacggcaactactggaaccagggctacggctaccagcagggctacgggcctggctatggcggctacgactactcgccctatggctattacggctacggccccggctacgactacagtcagggtagtacaaactacggcaagagccagcgacgtggtggccatcagaataactacaagccatactgaggcggccaagggagcgaccaactgatcgcacacatgctttgtttggatatggagtgaacacaattatgtaccaaatttaacttggcaaactttctattgcctgtcccatgtgcatcttatttaaaatttcccccatggaaatcactctcctgttgactatttccagagctctaggtgtttaggcagcgtgtggtgtctgagaggccatagcgccatcatgggctgatttttattaccaggtcccccagaagcaggtgagaggctctgcttcctgctgccgctctgcagcctggacctgtggaccctggttgtaaagagtaaattgtatcttaggaaaccagtgtcacctttttttcaccttttaattttatattatttgcgtcatacatttcctgtaacggaagtgttaattttactgtactttttggtaccccttttgggaatctaatgtattgtaaggtattttacacgtgtcctgattttgccacaacctggatattgaagctatccaagcttttgaaataaaatttaaaaaccccaagcctgggtgagtgtgggaaaaaaaaaaaaaaa

SEQ ID NO: 250 - DNA, 1121 bp, Homo sapiens
ggaattccctatagagccgggtgagagagcgagcgcccgtcggcgggtgtcgagggcgggttgcctcgcgctgacccttcccgccctccttctcgtcacacaccaggtccccgcggaagccgcggtgtcggcgccatggcggagctgacggctcttgagagtctcatcgagatgggcttccccaggggacgcgcggagaaggctctggccctcacagggaaccagggcatcgaggctgcgatggactggctgatggagcacgaagacgaccccgatgtggacgagcctttagagactccccttggacatatcctgggacgggagcccacttcctcagagcaaggcggccttgaaggatctgcttctgctgccggagaaggcaaacccgctttgagtgaagaggaaagacaggaacaaactaagaggatgttggagctggtggcccagaagcagcgggagcgtgaagaaagagaggaacgggaggcattggaacgggaacggcagcgcaggagacaagggcaagagttgtcagcagcacgacagcggctacaggaagatgagatgcgccgggctgctgctgaggagaggcggagggaaaatgccgaggagttagcagccagacaaagagttagagaaaagatcgagagggacaaagcagagagagccaagaagtatggtggcagtgtgggctctcagccacccccagtggcaccagagccaggtcctgttccctcttctcccagccaggagcctcccaccaagcgggagtatgaccagtgtcgcatacaggtcaggctgccagatgggacctcactgacccagacgttccgggcccgggaacagctggcagctgtgaggctctatgtggagctccaccgtggggaggaactaggtgggggccaggaccctgtgcaattgctcagtggcttccccagacgggccttctcagaagctgacatggagcggcctctgcaggagctgggactcgtgccttctgctgttctcattgtggccaagaaatgtcccagctgagggcctttgtcccattgtccctctgtgaccccttcatctttgataaagcactgacatctccttcctaataaatagaccctgagttctgt

SEQ ID NO: 251 - DNA, 2337 bp, Homo sapiens
ggagcggccaacatggcggaacgcaggagacacaagaagcggatccaggaagttggtgaaccatctaaagaagagaaggctgtggccaagtatcttcgattcaactgtccaacaaagtccaccaatatgatgggtcaccgggttgattattttattgcttcaaaagcagtggactgtcttttggattcaaagtgggcaaaggccaagaaaggagaggaagctttatttacaaccagggagtctgtggttgactactgcaacaggcttttaaagaagcagttttttcaccgagccctaaaagtaatgaaaatgaaatatgataaagacataaagaaagaaaaagataaaggaaaagctgaaagtggaaaagaagaagataaaaagagcaagaaagaaaatataaaggatgagaagacaaaaaaagaaaaagagaaaaaaaaagatggtgaaaaggaagaatccaaaaaggaggaaactccaggaactcctaaaaagaaggaaactaagaaaaaattcaaacttgagccacatgatgatcaggtttttctggatggaaatgaggtgtatgtatggatctatgacccagttcactttaaaacatttgtcatgggattaattcttgtgattgcagtaatagcggccaccctcttccccctttggccagcagaaatgagagtaggtgtttattacctcagtgtgggtgcaggctgttttgtagccagtattcttctccttgctgttgctcgatgcattctatttctcatcatttggctcataactggaggaaggcaccacttttggttcttgccaaatctgactgctgatgtgggcttcattgactccttcaggcctctgtacacacatgaatacaaaggaccaaaagcagacttaaagaaagatgagaagtctgaaaccaaaaagcaacagaagtccgacagtgaggaaaagtcagacagtgagaaaaaggaagatgaggaggggaaagtaggaccaggaaatcatggaacagaaggctcggggggagaacggcattcagacacggacagtgacaggagggaagatgatcgatcccagcacagtagtggaaatggaaatgattttgaaatgataacaaaagaggaactggaacagcaaacagatggggattgtgaagaggatgaggaagaggaaaatgatggagaaacacctaaatcttcacatgaaaaatcataatctgactaattttgggactgaatgaataagtacaagaggttggattttctatgttggctgattaccatattgaacacatggcatttgtagcattctttaaatctatctactgaaatgtatttgacattcaggcagttatattcggtccttcattttatagaatattggcactattattggtacagtttaaagccattaatatgttttatccatttgataattttacagtaagtaggtctcattcattttgacagttatcaaagatgtactttccacagttaaatttacattaatggcaatttttgatagttttatggctttttactgttagactaatcaaaaataactttaaaaggaacaaagaaactccaacatttcacattatgcatagttatgtagccatttcacagtttctttaagatgtgtaaactcattgtccttgatagtttttatttttcattataaaattataccaggagatttcttttaagattctgagttagcagagttcaaaactattttgtggaaacaagccaactagtaacaatgcagcaacacttctggtttagctaaattatttttccaatgtaggaaatccacactgatttgtacgtctgactgagagaaagatggtcgtctccagcagagaaagtgaacagcatttgttggaaggtgatggctctccctcctccctccccatttcattggcgtaacgtaaagtgtattctgtacataatttacaaataaaacattttattttaattgttacttattatttagatatttctcaacacttaaattcataaaattaagaccatgtaagggtatgtttttagagaaatggaagtttgagtaacccacagaacatctgtgatctttctacagcagcttcagttttgtgccaacattccatgtattttgaatatgagcaaaaactgatcttaagagcagacttaaagtagctttgtacgccttaatgttcattttgatttattttaaatctttacattcagaaatgagatactgtattatcagaccaggaggcattgctgtgaaagataatttcctattctaaaatatcaaatttaaaataaagataatgaaagaaaaaaaaaaaaaaaaaaa

SEQ ID NO: 252 - DNA, 3380 bp, Homo sapiens
gcacaccatggtgcacttctgtggcctactcaccctccaccgggagccagtgccgctgaagagtatctctgtgagcgtgaacatttacgagtttgtggctggtgtgtctgcaactttgaactacgagaatgaggagaaagttcctttggaggccttctttgtgttccccatggatgaagactctgctgtttacagctttgaggccttggtggatgggaagaaaattgtagcagaattacaagacaagatgaaggcccgcaccaactatgagaaagccatctcccagggccaccaggccttcttattggagggggacagcagctccagggatgtcttctcttgcaatgtgggtaacctccaacctgggtcgaaggcggcagtcaccctgaagtatgtgcaggagctgcctctggaagcagatggggctctgcgctttgtgctcccagctgtcctgaatcctagataccagttctctgggtcgtctaaggacagttgccttaatgtgaagactcctatagtccctgtggaggacctgccctacacactcagcatggtcgccaccatagattcccagcatggcattgagaaggtccaatccaactgccccttgagtcctaccgagtacctaggagaggacaagacttctgctcaggtttccctggctgctggacacaagtttgatcgggacgtggaactcctgatttactacaatgaggtgcatacccccagcgtggttttggagatggggatgcctaacatgaagccaggtcatttgatgggagatccatctgcaatggtgagtttctatccaaatatcccagaagatcaaccatcaaatacctgtggagagtttatctttctcatggaccgctcgggaagtatgcagagccccatgagtagccaggatacatctcgctgcgaatacaggcagccaaggaaacactgattttgctgctgaagagtttacctataggctgttatttcaacatctatggatttggctcttcctatgaggcatgctttccggagagtgtgaagtacactcagcaaacaatggaggaggctctggggagagtgaagcttatgcaggccgacctagggggcactgaaatcttggcaccactccagaacatttacaggggaccctccatcccaggccaccccctacagctttttgtctttacagatggagaagttacagacacgtttagtgtaattaaagaagttaggatcaacagacagaaacacaggtgtttctcatttggtattggagaaggcacctccaccagcctaataaaaggtattgcccgggcatcagggggcacctcagaatttatcacaggcaaagacaggatgcagtccaaggctctcaggactctgaaacgctctctgcagcctgtggtagaggatgtctctctgagctggcatttgcctcctggtctgtctgctaaaatgctttccccagaacagactgtcatctttaggggtcagagattaatcagctatgcccagctgaccgggaggatgccagcagcagagacaacaggagaagtatgcctcaaatatacactccagggcaagacttttgaggataaggtgacatttcctctacaacccaagcctgatgtcaacctcaccattcaccgccttgctgccaagtccttgctccagaccaaggacatgggcctcagggagactccagcaagtgataaaaaagatgcattgaaccttagccttgagtctggtgtcataagctccttcacagctttcattgctatcaataaggagctcaacaagccggttcaggggcctctggctcatagggacgtcccaaggccaattctgttgggtgcttctgccccattgaagataaaatgccaatcaggttttcgaaaggccttacactctgaccgtcctccttctgcatctcagcccagaggggaacttatgtgttataaggccaagacattccagatggacgattacagtctctgtgggttgataagtcacaaggaccagcacagtccaggctttggagagaatcaccttgtgcagctgatttaccaccaaaatgcaaatggttcctgggatctgaatgaagatctagccaagatcctaggtatgagtttggaagaaataatggctgcacagcctgccgagcttgtggattcctcaggctgggccaccatcctggccgtgatctggctgcacagcaatggtaaggacttgaagtgtgaatgggagcttctggaaaggaaggccgtggcctggatgcgtgcccatgcaggctccaccatgccttcggttgtgaaagctgctattactttcctgaagtcatctgtggatcctgctatctttgccttttgaagataccatccagaaaaagaagtgcctttaatttgctactgtcatttcctctagtatcacttttgctgtgatgatgtgttcttgtgtattataactctttattttttgccataaaagtaaaggatgcttactccacttcgcttctctgctccaggttcactttggatatgatctttcttttcccaacatatgccctcagaaaagtgacagtggtcccagaacctattccctttcttgagggagttcaaaacattcataggcagtaatgttcctcccagggtttccagggaaacaacatgaaaaacaggtgacatgaactacagactaaagattgcagcatttatgttagagaatgcttgaattagagaattttctgcattatctttgtctgttcactttctatcttatatacttatcagggccatactggtaagcttgcgtaggaggagttagagggaagttgaaagccaacatctggatcaatgtaatgtcaagatcacaaagacagagactgcaggggtccactgtgagaggtgacactgttggggaccttcctgattcattcttcttgggctttgctagcctgtacaacctacatgtcttttcttccactgcctgaaagacttgggttgaactataactgttggagagagatgttcctctttaatcatgaaacaccttaagaagtctataatgcaatccttagtcctaccctgaacctatgtgtcctctaagtcaggccctgatctagtgcagtaaagggaagggtgggcttaatgggagctttgcctgggacctgaacctggagcacttaccgcattaggaagaaaggagctccccgtaatcgttcctgacccttgtgtctcatataccctatcctggtggaaatgaccctatttgatatgctgtcccttaaaataacttgtatcaatattaaaatgactatttctaccctttaaaaaaaaaaaaaaaaaaaaaaaaaaaaaaaaaaaaaaaaaaaaaaaaaaaaaaaa

SEQ ID NO: 253 - DNA, 6823 bp, Homo sapiens
ggcggacaaaacgccaggcggatctcagaaggccagttcaaagacgagatcatcagatgttcattcatctggatcttcagatgcacatatggatgcatctggaccctcagatagtgatatgccaagtcggacacgacctaagagcccaagaaaacataattataggaatgaaagtgcccgtgaaagcctttgtgattctcctcatcagaatctctcaagacctcttctggaaaacaaacttaaagcattcagtattggaaaaatgagtacagctaagcgaactttaagtaaaaaggaacaggaagaattaaagaaaaaggaggatgaaaaggcagctgctgagatttatgaggagtttcttgctgcttttgaaggaagtgatggtaataaagtgaaaacatttgtgcgagggggtgttgttaatgcagctaaagaagaacatgaaacagatgaaaaaagaggtaaaatctataagccatcttcaagatttgcagatcaaaaaaatcctccaaatcagtcttccaatgaaagaccaccatctcttcttgtgatagaaaccaaaaaacctccacttaaaaaaggagagaaagaaaagaaaaaaagcaatttggaactcttcaaagaagaattaaagcaaattcaagaggaacgtgatgagagacataaaacaaaaggcagattaagtcgatttgaacctcctcagtcagattctgatggtcagcgtcgttctatggacgcgccttcaagaagaaatagatcatctggtgttcttgatgattacgcacctggctcacatgatgtaggagatccaagcactactaatttataccttggaaacattaatccacagatgaatgaagaaatgctgtgccaagaatttggaagatttggaccgttagccagtgtgaaaatcatgtggcctagaactgatgaagaaagagccagagagagaaattgcggctttgtggcctttatgaatagaagagatgctgaaagagctttaaaaaatttgaatggaaaaatgattatgtcttttgaaatgaagttaggttggggtaaagctgtacctattcctccacatccaatatacattccgccttctatgatggaacatacgcttcccccacctccatccggactgccttttaatgcgcagcctagagagcggttaaaaaaccctaatgctcctatgttaccgccacctaaaaacaaagaggattttgagaagactctgtcgcaagccatagtcaaagtggttatcccaacagaaaggaatttgctcgccctgatacatcgaatgatagagtttgttgtacgtgaagggccaatgtttgaagctatgattatgaacagagaaatcaacaatcctatgttcaggttcttatttgaaaaccagacaccagcccatgtttactataggtggaagctttattctattctgcagggagattctccaactaaatggcggacggaagattttcgtatgttcaaaaatggatctttttggaggccaccaccattaaatccgtacttgcatggaatgtcagaagagcaagaaacagaagcttttgtagaggaacctagtaaaaagggagcacttaaggaagaacagagggataaattggaagaaatcttgcggggattaactccaaggaaaaatgatattggagatgcaatggttttctgtcttaataatgctgaagctgctgaagaaatagtggattgcattactgagtcgttgtccatcttaaagacaccccttcctaaaaagattgccagattatatttggtttctgatgttttgtacaactcttcagccaaagttgctaatgcttcatattatagaaaattttttgaaacaaagttatgtcagatattttcagacctcaatgccacctatcgtacaattcaaggccatttacaatctgaaaactttaagcaacgggtaatgacttgcttcagagcatgggaagattgggcaatttatccagaaccatttttgatcaaactacaaaatattttcttaggacttgtaaatattattgaagaaaaggaaacagaggatgttccagatgaccttgatggtgcccccatcgaggaagagcttgatggtgcacctctggaagatgtagatggaattcctattgatgctactcccatcgatgatcttgatggagtccctataaaaagtcttgatgatgatcttgatggagtgcctttggatgcaactgaagactcaaaaaagaatgagcctatatttaaagttgccccatcaaaatgggaagctgtggatgaatctgaattggaagcacaggctgttacaacttctaaatgggaattatttgaccagcatgaagaatcagaagaagaagaaaatcaaaatcaagaagaagaaagtgaagatgaagaagatactcaaagttccaaatctgaagaacatcatttgtactctaatccaatcaaagaagaaatgactgagtctaagttctctaagtactctgaaatgagtgaggaaaaacgagccaaacttcgtgaaattgagctcaaagttatgaagtttcaggatgaattggaatctgggaaaagacctaaaaaaccaggccagagttttcaggagcaagtagaacactacagagataaacttcttcaacgagagaaagagaaagagttagaaagagaacgagaaagagacaagaaagataaagaaaaattggaatctcgctccaaagacaagaaggaaaaagatgagtgtactccgacaaggaaggaaaggaagaggcgacacagtacatcccccagcccatctcgcagtagcagtggtagacgagtgaaatccccatcaccaaaatcggagcgatcagagcgttcagaaagatctcataaagagagctcacggtccaggtcatctcacaaagattctcctagagatgttagcaaaaaagccaaaagatcaccatctggttcaaggacacctaaaaggtctaggcgatcacggtctagatctcctaaaaaatcaggaaagaagtccagatcccagtccagatctccacacaggtctcataaaaagtcaaagaaaaacaaacactgacgtaaatttttaagatgctgtcacttattggaaatgcgatttgttttgtgcctgaacggtctgttttttaaaaaaacaaaaaatcaaatgaaagagcattcctggggttttttgtttgtttgtgtatgcatgtgtaaactcatgagcaactgcatctgtagatctgtcattgttttatattgtgtaaattactttcattgtggctatttctcaagatgaaatttttattgttctaatggatttcatcagaaatgtgtataatggatctgctgacagtagtagtattttgttttaggatgttgtgacttagcaaaaataatacagatgtcttccccccttttgtagctttgacaatttgaattagatttcaaataaaatctgaacagaaaactataatgttgtttttttgccccaccggtgatattaagtcccttaaagtcctactgagtttcacactactgttgtgcttcttatacctgatgcactttataagccccagtgttcaagtagcttaagttttatatttactaagatgactatccaaattaagggacctgagactcctatttggtggtttgctaaccatttgcttttgataagtttctcttgggtaatactaatacccagatatcaaagactaggtagatatggcatggcgttttgttagtggaatgcctggctaaaacatttttttcacagaagcaatatgatttccatacatccaacccatgttctgagcaactacttacttttagggggaaattaaatatcttttcatttcctcttctattatgaaagaagtttatttgtaaaacaaattttctaacaaggtttggccatagaattctcttgtatgattgttgaccttttataatcttctgtaggctatctttcaaacactggcatcagaatattttttataagtttgtgtttaaacagcttagttggtccccccccccactcccaagagacttgggtttagttatagctttaagtaaaatttaaaaataaaatgtttttcaggaaacttcgtatctaatggtttgtaaattcaaggtgcaaaaagttgatttaaaccatttgcagagttgaactctattatgaaaataaatttgctacggtatgaggaagaaataaaacttgtgtaatgttggtcataatactgctataaatataataaagggttatgtagaattgaactgacactattatttgtgaatcttgatttcagttttttatgtaggcacttcatacactggtttgatgggttttttttttcctccctaaaagagaaagtagaaaactattctaacaatggattattttgatttagcttgctttttaaaaaaatcttttcaacttgttttacttaatcttgcctagtcacaaaataagatgtgcacccatggtttggagagttcctatattagctgagcagtgagatacactatttccaaacggtgcacacctacagtagctttggaaatgagccaatcactgttttacttaatggttcttatcagcatgcaaatattgcttgaaagttatttccttattcactgttttgttagtccattttgttaggaaacattaattcctaaaaatttgttcagaataattaaaagtgaacatttggtgctgatactcaaaaacctacaaatgtagccatttaaaaagtaacatgtttttctcccctgctcattgcctgggagaatggaattttatataactacctttctttgcaaaaataacggtcgtgtcgagttggtggtgattttggcattccatcttgcactggtttctagtataggcttagaaataattggtcaggtaataatctttccagtcaagttgcaagggatgcttatttctcttcaaaaaaagacatcctgcgggattgagtagaaaattttaggtcagttttgggtgcttatttgtaatatttttcctactacattggagtttagcagttctttttttctggatccagatacaagtgtcatggtttatcttacagtgggtgaaactgactttcttttggttgggtgggtgaggatttcttaggcctgatagaatatatattctgtgaagtttgttaatgtacatattagattgtattggatttttttttcttgaattgcaaatggtattattagataggttatttccagttttacttcatgacaaattacctagagtaaacctacttaatactccaatggattctatgaaagtttaatgggatcagaaattggtgacttataagggggaagatattctaccatatttttataatagcttattattcatgtttcttgtctgaaggacactcaagttacagagcaaaatttctataggttgactagaatgttcataagcatggtcttccagttgcaggaaagatcatgttctatctgtggacacttactgtcctctaccacagctacgtgccagagttgttttccacagttcttataaagggcatgacttaggctctttaccctccaacttaatgtttatacacagggattgtttactaggttaatgacatttaactcccctctcttctgtaggtgagagaaaataagtaagtcttgatctgtttcttaccaaagagagacagacctatgatggaaaatgatcacgtctctgaattttttctttaacgttatagttccttattacagatagtaagcatatgggaatttctgagctataacatgttgagaagttagaaattaaaactaacacaacaaaaggcgctgaatcaaaagatctttgcttttatttggctcagaatgtttttggcttttctgctaaagatggcagaaattactctacacagacctgatttttctttattgcagaccattcttgtgggcttaccctgagacttttatcccaattagtgaatcttggagggaatacttgcttatttatgacttaggtatttccccccaaactttaatattcttgagcacttgaaaatacttttgagaaattttaactgtgattaaatttaggtttattagaaatattctgtacacatttgcctccatggtggtgtaagttctgaaaaattatatgaccgtgacaatagtttatcatcatcattattgttattcaaaataagggtaaataaatctctgtattgccaaagtgacttaaactgttctgatgaccacacagtgtgatttctttagcagagaaagttggttttaaaaataaatagtaccacttttctaagactgtacagtttacaaataaggtttttttctttgttgttttcctcttctattaagttttagtgaaaagcctaattacagaaaattgtgcagatactagtgaagatactagtataagtttaaaggaacatgtgactgtaaaatctcacatttacaaagtgcttgatctcttcatatttcacacgcatgttttagaatagattttagggagtgtttaattcattatccttttgacttaaaatttttgttaccaacttcctaggacttagataatatataaataagtacaaatcccaggggaagtgttgtgatgctagactaaaaggtgggaatgtgctgctgttccgtgagccttgttccattgttgaaaatttgatgcctcagtgtttattcagtaccacctcatggagcttcaatgtaaatggattatatgtataattggtaatttgtatagttttgtagattgtagattaaatgcactcatcatgtc

SEQ ID NO: 254 - DNA, 6252 bp, Homo sapiens
gcggggggcaatggcactgcagctctgggccctgaccctgctgggcctgctgggcgcaggtgccagcctgaggccccgcaagctggacttcttccgcagcgagaaagagctgaaccacctggctgtggatgaggcctcaggcgtggtgtacctgggggcggtgaatgccctctaccagctggatgcgaagctgcagctggagcagcaggtggccacgggcccggccctggacaacaagaagtgcacgccgcccatcgaggccagccagtgccatgaggctgagatgactgacaatgtcaaccagctgctgctgctcgaccctcccaggaagcgcctggtggagtgcggcagcctcttcaagggcatctgcgctctgcgcgccctgagcaacatctccctccgcctgttctacgaggacggcagcggggagaagtctttcgtggccagcaatgatgagggcgtggccacagtggggctggtgagctccacgggtcctggtggtgaccgcgtgctgtttgtgggcaaaggcaatgggccacacgacaacggcatcatcgtgagcactcggctgttggaccggactgacagcagggaggcctttgaagcctacacggaccacgccacctacaaggccggctacctgtccaccaacacacagcagttcgtggcggccttcgaggacggcccctacgtcttctttgtcttcaaccagcaggacaagcacccggcccggaaccgcacgctgctggcacgcatgtgcagagaagaccccaactactactcctacctggagatggacctgcagtgccgggaccccgacatccacgccgctgcctttggcacctgcctggccgcctccgtggctgcgcctggctctggcagggtgctatatgctgtcttcagcagagacagccggagcagtggggggcccggtgcgggcctctgcctgttcccgctggacaaggtgcacgccaagatggaggccaaccgcaacgcctgttacacaggcacccgggaggcccgtgacatcttctacaagcccttccacggcgatatccagtgcggcggccacgcgccgggctccagcaagagcttcccatgtggctcggagcacctgccctacccgctgggcagccgcgacgggctcagaggcacagccgtgctgcagcgtggaggcctgaacctcacggccgtgacggtcgccgccgagaacaaccacactgttgcttttctgggcacctctgatggccggatcctcaaggtgtacctcaccccagatggcacctcctcagagtacgactctatccttgtggagataaacaagagagtcaagcgcgacctggtactgtctggagacctgggcagcctgtacgccatgacccaggacaaggtgttccggctgccggtgcaggagtgcctgagctacccgacctgcacccagtgccgcgactcccaggacccctactgcggctggtgcgtcgtcgagggacgatgcacccggaaggccgagtgtccgcgggccgaggaggccagccactggctgtggagccgaagcaagtcctgcgtggccgtcaccagcgcccagccacagaacatgagccggcgggcccagggggaggtgcagctgaccgtcagccccctccctgccctgagcgaggaggacgagttgctgtgcctttttggggagtcgccgccacaccccgcccgcgtggagggcgaggccgtcatctgcaactccccaagcagcatccccgtcacaccgccaggccaggaccacgtggccgtgaccatccagctcctccttagacgaggcaacatcttcctcacgtcctaccagtaccccttctacgactgccgccaggccatgagcctggaggagaacctgccgtgcatctcctgcgtgagcaaccgctggacctgccagtgggacctgcgctaccacgagtgccgggaggcttcgcccaaccctgaggacggcatcgtccgtgcccacatggaggacagctgtccccagttcctgggacccagccccctggtgatccccatgaaccacgagacagatgtgaacttccagggcaagaacctggacaccgtgaagggttcctccctgcacgtgggcagtgacttgctcaagttcatggagccggtgaccatgcaggaatctgggaccttcgcctttcggaccccaaagctgtcccacgatgccaacgagacgctgcccctgcacctctacgtcaagtcttacggcaagaatatcgacagcaagctccatgtgaccctctacaactgctcctttggccgcagcgactgcagcctgtgccgggccgctaaccccgactacaggtgtgcgtggtgcgggggccagagcaggtgcgtgtatgaggccctgtgcaacaccacctccgagtgcccgccgcccgtcatcaccaggatccagcctgagacgggccccctgggtgggggcatccgcatcaccatcctggggtccaatttgggcgtccaagcaggggacatccagaggatctctgtggccggccggaactgctcctttcagccggaacgttactccgtgtccacccggatcgtgtgtgtgatcgaggctgcggagacgcctttcacggggggtgtcgaggtggacgtcttcgggaaactgggccgttcgcctcccaatgtccagttcaccttccaacagcccaagcctctcagtgtggagccgcagcagggaccgcaggcgggcggcaccacactgaccatccacggcacccacctggacacgggctcccaggaggacgtgcgggtgaccctcaacggcgtcccgtgtaaagtgacgaagtttggggcgcagctccagtgtgtcactggcccccaggcgacacggggccagatgcttctggaggtctcctacggggggtcccccgtgcccaaccccggcatcttcttcacctaccgcgaaaaccccgtactgcgagccttcgagccgctacgaagctttgccagtggtggccgcagcatcaacgtcacgggtcagggcttcagcctgatccagaggtttgccatggtggtcatcgcggagcccctgcagtcctggcagccgccgcgggaggctgaatccctgcagcccatgacggtggtgggtacagactacgtgttccacaatgacaccaaggtcgtcttcctgtccccggctgtgcctgaggagccagaggcctacaacctcacggtgctgatcgagatggacgggcaccgtgccctgctcagaacagaggccggggccttcgagtacgtgcctgaccccacctttgagaacttcacaggtggcgtcaagaagcaggtcaacaagctcatccacgcccggggcaccaatctgaacaaggcgatgacgctgcaggaggccgaggccttcgtgggtgccgagcgctgcaccatgaagacgctgacggagaccgacctgtactgtgagcccccggaggtgcagcccccgcccaagcggcggcagaaacgagacaccacacacaacctgcccgagttcattgtgaagttcggctctcgcgagtgggtgctgggccgcgtggagtacgacacacgggtgagcgacgtgccgctcagcctcatcttgccgctggtcatcgtgcccatggtggtcgtcatcgcggtgtctgtctactgctactggaggaagagccagcaggccgaacgagagtatgagaagatcaagtcccagctggagggcctggaggagagcgtgcgggaccgctgcaagaaggaattcacagacctgatgatcgagatggaggaccagaccaacgacgtgcacgaggccggcatccccgtgctggactacaagacctacaccgaccgcgtcttcttcctgccctccaaggacggcgacaaggacgtgatgatcaccggcaagctggacatccctgagccgcggcggccggtggtggagcaggccctctaccagttctccaacctgctgaacagcaagtctttcctcatcaatttcatccacaccctggagaaccagcgggagttctcggcccgcgccaaggtctacttcgcgtccctgctgacggtggcgctgcacgggaaactggagtactacacggacatcatgcacacgctcttcctggagctcctggagcagtacgtggtggccaagaaccccaagctgatgctgcgcaggtctgagactgtggtggagaggatgctgtccaactggatgtccatctgcctgtaccagtacctcaaggacagtgccggggagcccctgtacaagctcttcaaggccatcaaacatcaggtggaaaagggcccggtggatgcggtacagaagaaggccaagtacactctcaacgacacggggctgctgggggatgatgtggagtacgcacccctgacggtgagcgtgatcgtgcaggacgagggagtggacgccatcccggtgaaggtcctcaactgtgacaccatctcccaggtcaaggagaagatcattgaccaggtgtaccgtgggcagccctgctcctgctggcccaggccagacagcgtggtcctggagtggcgtccgggctccacagcgcagatcctgtcggacctggacctgacgtcacagcgggagggccggtggaagcgcgtcaacacccttatgcactacaatgtccgggatggagccaccctcatcctgtccaaggtgggggtctcccagcagccggaggacagccagcaggacctgcctggggagcgccatgccctcctggaggaggagaaccgggtgtggcacctggtgcggccgaccgacgaggtggacgagggcaagtccaagagaggcagcgtgaaagagaaggagcggacgaaggccatcaccgagatctacctgacgcggctgctctcagtcaagggcacactgcagcagtttgtggacaacttcttccagagcgtgctggcgcctgggcacgcggtgccacctgcagtcaagtacttcttcgacttcctggacgagcaggcagagaagcacaacatccaggatgaagacaccatccacatctggaagacgaacagcttaccgctccggttctgggtgaacatcctcaagaacccccacttcatctttgacgtgcatgtccacgaggtggtggacgcctcgctgtcagtcatcgcgcagaccttcatggatgcctgcacgcgcacggagcataagctgagccgcgattctcccagcaacaagctgctgtacgccaaggagatctccacctacaagaagatggtggaggattactacaaggggatccggcagatggtgcaggtcagcgaccaggacatgaacacacacctggcagagatttcccgggcgcacacggactccttgaacaccctcgtggcactccaccagctctaccaatacacgcagaagtactatgacgagatcatcaatgccttggaggaggatcctgccgcccagaagatgcagctggccttccgcctgcagcagattgccgctgcactggagaacaaggtcactgacctctgacctacaatctccagtgctgccttgggacataggtacctgaggtacctgagagcccctcaggggaggaggccgagtggctgtggctgaggcccccaccctcccctggaacgcgccccaagccggagtgggtgcagccggaacccgcccagcgtctagactgtagcatcttcctctgagcaataccgccgggcaccgcaccagcaccagccccagccccagctccctccggccgcagaaccagcatcgggtgttcactgtcgagtctcgagtgatttgaaaatgtgccttacgctgccacgctgggggcagctggcctccgcctccgcccacgcaccagcagccgcctccatgccctaggttgggcccctgggggatctgagggcctgtggcccccagggcaagttcccagatcctatgtctgtctgtccaccacgagatgggaggaggagaaaaagcggtacgatgccttcctgacctcaccggcctccccaagggtgccggcactctgggtggactcacggctgctgggccccacgtcaaaggtcaagtgagacgtaggtcaagtcctacgtcggggcccagacatcctggggtcctggtctgtcagacaggctgccctagagccccacccagtccggggggactgggagcagttccaagaccaccccacccctttttgtaaatcttgttcattgtaaatcaaatacagcgtctttttcactccg

SEQ ID NO: 255 - DNA, 7834 bp, Homo sapiens
cgtctgaaggtcacgagccccgccgacagcccagacccagtccgggctagcccgaggcctccctggaggtggacggtttcagtccacacatactgggaccccagggagacactcaccagcatccgagcctgccatgtttcagaggcaggtcgccgccggactccgacgcggccgggaaggcgacggtgtcctggaaggaccgatccacgcagaccgacactgggcgcggacgcacgaaccaaagcgcgggaaggaggcgtgaagaaggacggacgttaaagagcttctcgccgctgattggtcatcagaggagcacttccttcacaggacgtgaaacgggggcggtttgggaagtttagagaccattctccgccgaccaaaacccgtcaaaggattatcagacacgcgggtcggacggtccacatcagccggcagcccgggcgggtcccggggtgcgagcagcgcacttccggtgagctatttcgttttgtatccctccgccgacgtcaacgggaaagtagtgcggaccgctctctcggtggtccggggtggtacagccacgtgacaacgccaggccccgccttccccctcttttggttacagacgtgagggctctttggagacgtaaacatctccgagtggcgagggtgggcggggctagggcttgggaaagggcggggtggcttgcttgaggtgtggaaagaccagaagaaggtgaggtcaagagagtgcgaatgaggcattccaatggtgggtgggccctgacctgagagagtggcgcggggaggggtgaaagcgcggcgatcctggaacgccagcgggcgttgcggcctatgcgcgaggggcggggcgattaggtcatagagcggctcccagcgttccctgcggcgtaggaggcggtccagactacaaaagcggctgccggaaagcggccggcacctcattcatttctaccggtctctagtagtgcagcttcggctggtgtcatcggtgtccttcctccgctgccgcccccgcaaggcttcgccgtcatcgaggccatttccagcgacttgtcgcacgcttttctatatacttcgttccccgccaaccgcaaccattgacgccatgtcgggttattcgagtgaccgagaccgcggccgggaccgagggttattcgagtgaccgagaccgcggccaccgagggtgagtttgggagccgagctgtcaggccaggcgggtggggggatgggagggcgggtcagggtggcggccggcgggggctttgcggcttggacttggcctttccgggctatcttgggacttcctttcccgaacgttgcgccattttgatattcacgtcacagtgattggaagagatttgacggtgtagtgtcttcaagcttgctttttgtgtggggatttggggagctgtcggggcggctgccatttggtagctgttgagggagttgagagggagcgtattgtgcggatgaaagcggacgcttcgaggcatgacgaaggaacatctgttaggtgcggcgtttcggtaggtgtttttggggtggccgggcattctgtgggagcgaggggaccacttccaaagccctggtgctgttggggtaggagggcggccggcatcagccatgtggctgagtcgcgagtacaaaatgccggcctcggacatggcggcggcgcctttgttaccccgcccggcggaggagctcaaaatggcagcgtcgagaaaatgtggcgcagagagaaatgcgagacaaagggggaagcgccgccccagcgggaacgccgcccggccgactccgcccgggccgggactcctcccccggtagtcgccggctcctccttttcttttttcctgcgttatataattttgattcgttgatccggagctctaccgcggcgttcccccagctgggtttgctagcagaagtgtttctgagaaaacccttgttctgttatcgctgactgtactgtttaggttcttaccatcaaagctgtttggttccaaaacggccatatgagtaacatcgtcgtgatgctcttcggttcatgtagccttgttattgctgatagtgaattgctaggctggtggggaagattacagtaaccacaagaagtggtgtgtgccagaatcccaaattctggcatgtgggtgacaagtttccgacatgataaatccccggcttccgacatgataaatcccaggctgtttacatgacctaagtaatgtgtacttgggactacgggaaatgttaactgtggctgttgagagagagagagattttcacgaaggacagtgctaggtttacctctcgaagtctgttttcagtggtttttagcttgtgccaatggatgacaaatctatacagaaacctgggtatagcctaaagaaaatgtgaataacgttttttttcattccaggtttggtgcacctcgatttggaggaagtagggcagggcccttatctggaaagaagtttggaaaccctggggagaaattagttaaaaagaagtggaatcttgatgagctgcctaaatttgagaagaatttttatcaagagcaccctgatttggctaggcgcacagcagtgagtaaattcatgtggcttcatcaggctgtaactcgatcgtggattctagtaaatgaaattctgacaggtgttttgcaaataactcaattttggtagagttacatgttctgacttcataattgggaaaggtgtgactcacttttggaatataggtggctttgggatttttacttaaattaggttgagtataacaagaaatttttttttcataatagggtgttcataggtgggtcagattaaaatgaaggctactttaactagttactaaattatgaagttaggggcttatcaattacgtatttacgtagggtggtgtcatgaatttagactgtatattgtttgcagcaagaggtggaaacatacagaagaagcaaggaaattacagttagaggtcacaactgcccgaagccagttctaaatttttatgaagccaatttccctggtaagtgctacttttcagttctacctacccgtgtttttgtttccacctaccccctctttttcttggcatcactaatttttactaaatatctgttactaattatagcaaatgtcatggatgttattgcaagacagaatttcactgaacccactgctattcaagctcagggatggccagttgctctaagtggattggatatggttggagtggcacagactggatctgggaaaacattgtctgtaagtttgggagaactcttgagttgatctgatatatgcaagaaaatgtaatggtaatttaaaaacgagtattttaatgtgatttctgtttgtccccactttcaccctaaatagtatttgcttcctgccattgtccacatcaatcatcagccattcctagagagaggcgatgggcctattgtaagtatatattttacttttattagaagcataatgtgtagattttagactacatagctaaagatgtaatcatttgtggtggttttatatagaggttagctcatcctattcagctggagctgttttgggtattggacaacacatgaagaaaggatctgctagtataataagttagcagtttaaaactagtaccaggtttgtgctgaaagctgtttctcttttccttagtgtttggtgctggcaccaactcgggaactggcccaacaggtgcagcaagtagctgctgaatattgtagagcatgtcgcttgaagtctacttgtatctacggtggtgctcctaagggaccacaaatacgtgatttggagagaggtatgtaatgaaaagggttttatttgtcattggtgctaaatatcctaggtattgtagttacacttacgtatttaattaaaggtgtggaaatctgtattgcaacacctggaagactgattgactttttagagtgtggaaaaaccaatctgagaagaacaacctaccttgtccttgatgaagcagatagaatgcttgatatgggctttgaaccccaaataaggaagattgtggatcaaataagagtaagtgtcctttgaaatatgtgatcaaactgaattgtgtttcactcttaagagtctgatactaatttttccccccaaaatccattagcctgataggcaaactctaatgtggagtgcgacttggccaaaagaagtaagacagcttgctgaagatttcctgaaagactatattcatataaacattggtgcacttgaactgagtgcaaaccacaacattcttcagattgtggatgtgtgtcatgacgtagaaaaggatgaaaagtaagttttattaactctgttatatttgcttcctaacaactttgctgtaaaattgaggatcattgtttggtgagttgttttaggttatttcagttggtgtgatttcatttagttagcctactaatcctgaaaatttcttgaatcttcaaataatggccgtcaccatttatagctttccatatgaagaattgaattcatgtctccctggttgacttaaggaccaagggtcgaactgctcgataagtggattagcaggcgtcttccttccttttgacctttccagccatgtaaattgaacttaatgttttgctgaccataaatgtgtggccctagcaatggtcttttaaaactcaggattttcctttctctctcctattattagacttattcgtctaatggaagagatcatgagtgagaaggagaataaaaccattgtttttgtggaaaccaaaagaagatgtgatgagcttaccagaaaaatgaggagagatgggtatgtgtgagctcctccttgaagcagattgattaaaacagcttaggaagggcaaacttggatcacgagcagtggatttttttcatatctgatagtgaatttaactttttcatttctggcgaaattaaagagatctgtgaccaaaagtggtcaagcactggagtctgaggttttcaatgtgagtttaataacacaacttgtcttttaacttaggtggcctgccatgggtatccatggtgacaagagtcaacaagagcgtgactgggttctaaatggtaaatatttcaaatgaagtatttttcccccttacttaacctagctagaattcaaacatggaaaagctcctattctgattgctacagatgtggcctccagagggctaggttagtacaaactcgcattcatggcttggtttcccagaagatctccatttaacttttttaaagaaagtttattgctttctttaacctgcattttttctaagttttttttcacataaaggtgctgtctttgtggcaaggcctaggcatgacaatcggaggactcgagggggatggaggactagtgatcggctggctgcttccagtcgattagagaggtgaaaagctgaacgtgtgccagtaatcttcaaaaggcagaacatatcacctctgccccgtaaactgttctctccgagggaaaaaatggaagttatctcacagttcactgccgtggtatttcttctgtcccatgctttgcatgactgccatggtacagccttgtttcaaactgttcactgtgatctgtgggtctttgagtttcagtgagtttgctgaaatgtcgaagaagtagttccaaacttcaatgttcaatgaaatttttgttcaagtttgaaatggagagagcagctttaaaaggtactaagccttttacaaattggtgagttactggcacatgagatctagagcaggagcaacttctacacactatgagtaagtgggaaaagaaagtgctttgaaagttcctccctcacctacacagtagtcgtcatgtcgagacctgccagagagagacacattctcaagtgaatcctggcttcttggaagcgcttgcctagacgagacacagtgcataaaaacaacttttgggggacaggtatgttttcttgcagctgcggttgtaaggtcttggcaagacaagcagtgtggccagaattttgaacttctgatgaatgtgtaatgcaaaggaccttgtacatttttttgtttcaaggtcctcaaaatgagcacatgaagaggttgctgtgaaactttaagtggccctactgcgcagaagcattcagatgtcacttgatgatctgtaagggaacttgctgatttgggaatgtgcttatttaacacacattccttttgacagggtctgtcactggggtgggggtgatgaattatacagatgacatgtgctttttttttcttttttcaacctcaatggtattcctacaggaaatggataaccattttaactgtatttttttgcagcccgtaccttcttgggaatacaattgtctaactttttatttttggtctggctgttgtggtgtgcaaaactccgtacattgctattttgccacactgcaacaccttacagatgtggaagatgtgaaatttgtcatcaattatgactaccctaactcctcagaggattatattcatcgaattggaagaactgctcgcagtaccaaaacaggcacagcatacactttctttacacctaataacataaagcaagtgagcgaccttatctctgtgcttcgtgaagctaatcaagcaattaatcccaagttgcttcagttggtcgaagacagaggttcaggtaaggatgactgataggaaatgttggtagttacggtcactacgtatacaaatccatttaaatggtattggagggtgagtaaaaccttgaagtgaaaacttaagctgaaaaattgtaaaaacatttcacgcctaccatgaatagatctgtttcttctgtccacaatgatttgtgtcatagacataattgatcaatttgcaattgttttcttgacaggtcgttccaggggtagaggaggcatgaaggatgaccgtcgggacagatactctgcgggcaaaaggggtggatttaatacctttagagacagggaaaattatgacagaggttactctagcctgcttaaaagagattttggggcaaaaactcagaatggtgtttacagtgctgcaaattacaccaatgggagctttggaagtaattttgtgtctgctggtatacagaccagttttaggactggtaatccaacagggacttaccagaatggttatgatagcactcagcaatacggaagtaatgttccaaatatgcacaatggtatgaaccaacaggcatatgcatatcctgctactgcagctgcacctatgattggttatccaatgccaacaggatattcccaataagactttagaagtatatgtaaatgtctgtttttcataattgctctttatattgtgtgttatctgacaagatagttatttaagaaacatgggaattgcagaaatgactgcagtgcagcagtaattatggtgcactttttcgctatttaagttggatatttctctacattcctgaaacaatttttaggttttttttgtactagaaaatgcaggcagtgttttcacaaaagtaaatgtacagtgatttgaaatacaataaatgaaggcaatgcatggccttccaataaaaaatatttgaagactgaattaagtggaaattgtactttatttatataatgtcatgtaaaactttgcttaagatggtctggttttttttttgtttttgtttggttttttttttccatgaaaacaaatgactgttcctttttatttaatttgggaggcagggggaatcagaaggcccttctttataatgagctattcatattgcaggagtcagaatgaattgatacaggtgaatttttagttacaggctaaattgcataaaagctt

SEQ ID NO: 256 - DNA, 903 bp, Homo sapiens
cggcggcggcgacaggaccgaggggccttagttggtgggcaagtcggggatcccagaaagagaagcgtgacccggaagcggaaacgggtgtccgtcccagctccggcctgccagtgagcttctaccatcatggacctattgttcgggcgccggaagacgccagaggagctactgcggcagaaccagagggccctgaaccgtgccatgcgggagctggaccgcgagcgacagaaactagagacccaggagaagaaaatcattgcagacattaagaagatggccaagcaaggccagatggatgctgttcgcatcatggcaaaagacttggtgcgcacccggcgttatgtgcgcaagtttgtattgatgcgggccaacatccaggctgtgtccctcaagatccagacactcaagtccaacaactcgatggcacaagccatgaagggtgtcaccaaggccatgggcaccatgaacagacagctgaagttgccccagatccagaagatcatgatggagtttgagcggcaggcagagatcatggatatgaaggaggagatgatgaatgatgccattgatgatgccatgggtgatgaggaagatgaagaggagagtgatgctgtggtgtcccaggttctggatgagctgggacttagcctaacagatgagctgtcgaacctcccctcaactgggggctcgcttagtgtggctgctggtgggaaaaaagcagaggccgcagcctcagccctagctgatgctgatgcagacctggaggaacggcttaagaacctgcggagggactgagtgcccctgccactccgagataaccagtggatgcccaggatcttttaccacaacccctctgtaataaaagagatttgacactaaaaaaaaaaaaaaaaaaaaaaa

SEQ ID NO: 257 - DNA, 1860 bp, Homo sapiens
cgtgaacggtcgttgcagagattgcgggcggctgagacgccgcctgcctggcacctaggagcgcagcggagccccgacaccgccgccgccgccatggagtccgagaccgaacccgagcccgtcacgctcctggtgaagagccccaaccagcgccaccgcgacttggagctgagtggcgaccgcggctggagtgtgggccacctcaaggcccacctgagccgcgtctaccccgagcgtccgcgtccagaggaccagaggttaatttattctgggaagctgttgttggatcaccaatgtctcagggacttgcttccaaagcaggaaaaacggcatgttttgcatctggtgtgcaatgtgaagagtccttcaaaaatgccagaaatcaacgccaaggtggctgaatccacagaggagcctgctggttctaatcggggacagtatcctgaggattcctcaagtgatggtttaaggcaaagggaagttcttcggaacctttcttcccctggatgggaaaacatctcaaggcctgaagctgcccagcaggcattccaaggcctgggtcctggtttctccggttacacaccctatgggtggcttcagctttcctggttccagcagatatatgcacgacagtactacatgcaatatttagcagccactgctgcatcaggggcttttgttccaccaccaagtgcacaagagatacctgtggtctctgcacctgctccagcccctattcacaaccagtttccagctgaaaaccagcctgccaatcagaatgctgctcctcaagtggttgttaatcctggagccaatcaaaatttgcggatgaatgcacaaggtggccctattgtggaagaagatgatgaaataaatcgagattggttggattggacctattcagcagctacattttctgtttttctcagtatcctctacttctactcctccctgagcagattcctcatggtcatgggggccaccgttgttatgtacctgcatcacgttgggtggtttccatttagaccgaggccggttcagaacttcccaaatgatggtcctcctcctgacgttgtaaatcaggaccccaacaataacttacaggaaggcactgatcctgaaactgaagaccccaaccacctccctccagacagggatgtactagatggcgagcagaccagcccctcctttatgagcacagcatggcttgtcttcaagactttctttgcctctcttcttccagaaggccccccagccatcgcaaactgatggtgtttgtgctgtagctgttggaggctttgacaggaatggactggatcacctgactccagctagattgcctctcctggacatggcaatgatgagtttttaaaaaacagtgtggatgatgatatgcttttgtgagcaagcaaaagcagaaacgtgaagccgtgatacaaattggtgaacaaaaaatgcccaaggcttctcatgtgtttattctgaagagctttaatatatactctatgtagtttaataagcactgtacgtagaaggccttaggtgttgcatgtctatgcttgaggaacttttccaaatgtgtgtgtctgcatgtgtgtttgtacatagaagtcatagatgcagaagtggttctgctggtaagatttgattcctgttggaatgtttaaattacactaagtgtactactttatataatcaatgaaattgctagacatgttttagcaggacttttctaggaaagacttatgtataattgctttttaaaatgcagtgctttactttaaactaaggggaactttgcggaggtgaaaacctttgctgggttttctgttcaataaagttttactatgaatgaccctg

SEQ ID NO: 258 - DNA, 5350 bp, Homo sapiens
tttattgaacatttattctgttcaaaacattcccaaaggcaacagaagatacaaataaatctctgcccatgaaaaggtgtggggggcattagaaggcgttctcttcggtgtaatgaagtaatgagagaagaaaaagtagtttgaagctatggagtaagggactttgagtatcccaggctcaaaaagttgggacttgaacagtacgggggtgctgctgaaaacgtttgagggaggtaatgacatgatcgaagctatacttgagaaaggtgaatctgataaagtatgagtgaaaaagagactgaaggtctagaaattagattgaggctaatgacaaaatccacataaataggaggacttgaacgaaggggcacttagaagaggacaggagatagtaaaaggcattcaatgatgagagcacacactacaggggagcatgagggaggttggaaaagataatgaaaggattaccgagcttcactgacgatgtgtttgaaatgagcaggaatcttgtagtgatcctaatccgtggttttctggagcatttcacagcctaggaacatacaaggggggcatctccctggaatgtaaattgactaagaggaattcaataatggtcaaatgaatgcagaattttagagtcttgcttagtattctcaccacatttcgtttagtctactcatactctttttctcttactgctgacactagatggaaaaactcttaattaaaagtatttcacaaaatgtgctcgttttcagtcattccgtttccactccagcctgttgtgttgtttttttgaaataataatttaaagtaattttccttttgcaggatggcatagtcaatccaacaataagaaaagatttgaaaactggaccgaaattctactgctgtccaattgaaggctgccccagaggccctgagagaccgttttctcagttttctctcgtaaaacagcactttatgaaaatgcatgctgagaagaagcacaaatgtagtaagtgcagcaattcgtacggtacagaatgggacctgaaaagacatgcagaggactgtggcaagaccttccggtgcacatgcggctgtccctacgccagtagaacagcactgcagtctcacatctaccgaactgggcacgagatacctgcagaacacagggacccacctagtaagaaaaggaaaatggaaaactgtgcacaaaaccagaagttatccaacaagaccattgaatcattgaacaaccaaccaatccctagaccagacactcaagaactagaagcttcagaaataaagctagaaccatcttttgaagactcttgtggctctaacactgacaagcagactcttacaacaccaccgagatatcctcagaagttgcttttaccaaagcccaaagtggctttggttaaactacccgtgatgcagttttctgtcatgcctgtctttgtgcctacagccgactcctcagcccagcctgtggtgttaggtgttgatcagggctctgccacaggggctgtgcacttaatgcccttgtcagtaggaaccctgatcctcggcctagattcagaggcttgctctcttaaggagagcctacctcttttcaaaattgctaatcctattgctggtgagccaataagtactggtgttcaagtgaactttggtaaaagtccatctaatcctttacaagaactagggaacacgtgtcaaaagaatagcatttcttcaatcaacgtgcagacagatctgtcttatgcctcacaaaactttataccttctgcacagtgggccactgctgattcctctgtgtcgtcttgttctcaaactgatttgtcgtttgattctcaagtgtctcttcccattagtgttcacactcagacatttttgcccagctctaaggtaacttcatctatagctgctcagactgatgcatttatggacacctgtttccagtcaggtggggtctccagagaaactcaaaccagtgggatagaaagtccaacggatgaccatgtacagatggaccaagctggaatgtgcggagacatttttgagagtgttcattcatcatataatgttgctacaggtaacattataagcaacagtttagtagcagagacagtaactcatagtttgttacctcagaatgagcctaagactttaaatcaagatattgagaaatctgcaccaattataaatttcagtgcacagaatagtatgcttccttcacagaacatgacagataatcagacccaaaccatagatttattaagtgatttggaaaacatcttgtcaagtaatctgcctgcccagacattggatcatcgtagtcttttgtctgacacaaatcctggacctgacacccagctcccatctggcccagcccagaaccccggaatcgattttgatatcgaagagttcttttcggcctcaaatatccagactcaaactgaagagagtgaacttagcaccatgaccaccgagccagtcttggagtcactggacatagagactcaaacggacttcttactcgcagatacctctgctcagtcctatgggtgtaggggaaattctaacttcttaggccttgagatgtttgacacacagacacagacagacttaaactttttcttagacagtagccctcatctgcctctgggaagtattctgaaacactccagcttttccgtgagtactgattcatctgacacagagacccaaactgaaggagtctccactgctaaaaatatacctgctctagaaagcaaagttcagttgaacagtacagaaacacagaccatgagttctgggtttgaaaccctggggagcttgttcttcaccagcaacgaaactcagacagcaatggatgactttcttctggctgatctggcctggaacacgatggagtctcagttcagctctgtagaaacccagacttctgcggaaccacacacagtctccaacttctaaaactaacggtggagtccatgtgtgaaatggcatctaccatttcctctggattaaaactacggactggggacaacagtattaattcgattgaatgtggctgatgatgcagttgcttagcttctttgtgtttctttgccttttgtacttgtaaacagaaatttgcgtataaatgtgagtgtattataaagtttgagatgttgatctaaattgtttttgtgttgcctacatttgccttttcacagctagtcttttcatgttaaaaaaaaaatgtatttcatatctataaaacctatatagccatttagctgaagcccagcttaccaggttcaagggtacaaacttctcaaatcttcaaaacattttagtcaaagtgtaatatacttaaactgcacctaaaatatctttggcactgcttgttagaaattcctgattcctgttactaatcactaaagaaaccggatgctgccaccgtaggatttaagcagtagtgcttccatgctcttaagactcctgctgcctggaccttcgtcagctttgacacctcttttctgatttaaagacaccaaggaaaactacaactgtctttagctttgaagcagttttcatgtaatcattgccacctcttcgctacatgaactactattgataccagcatacaagtgtatagcactttacacacaagaggtttattgatgtaaaattatcggctagggaagcagcagcgggccaggtgtggtggcttacccctgtaatcccagcactttgggaggccaaagcaggacgatcacttgagcccaggagttcaacaccagcttgggcaacataagaagaccgtgtctctggaattttttttttttttaattagccaggcacagtggcatgcgcctgtgatcccagctacttggaaggctgaggtgagaggatcactcgaggagattggggctgccatgagccatggtcttggcactgtactccaacctgggtaacagggcaagaccctatctcaaaaaaaaaaaaaaaagtcgccagcaacaagcacgtagtgtagtgttcctgctaaatgagcataggttatccaaaccttgggaacagggagttatggaaacgtgcctatgacttcatcttggggtgtgtcctatgaagatcctttctggtctccacagtaggccagagttgggggctctggagctgtttccccaagtgcatccacaagctggatctgagttttgtcactctaaaattaaacaagaaaaaaagtgggaaaagggcatcccccattaggtttcaatactttgcacttctactaagcttgatagggcaggagtgcaatctacaattattttaaagtgaatttccttccattcaccattctttatcttttctttgaataagaaaaagtatctagcaaggatattacttgtgccttgaggctagcaattataggatagattcatctaaaatatggtattctgcattttggttttttttcttaagtgaataataccagtcttcaaagaaaacaaggtgaagacctattgcttcaataatcaagaatgctttgtgtgttttgaggtaggagcatgatcaagtatgctttggggattttctgtatttaggagatcctggattcttaattgttggctaagttccagtcaagtaggaatcagtgcagcctgtaagttctccacattgacacacacacacacacacacacacacacacacacacgacatgctcctttctgtggcacatgcctgtattactgaaagctaaatcctcaaaacctagtaaggggaccaatgattcattaaagtaaattgatggttttgctactaattcctatcccatacatttgacacaaaagaagtgttggtaatggataaataacatatcccgggcagatgagctcaacctagtaggtaagagtttggtttggtcacagttgcctatgagtgtgggtttcaaaagaaacataaagccttaacttagaatttcattatgttttagaatcatcactgccttaatattcaagcatctatttaagtcctaataaaggagaaatgcatgtttatggcttttttgtaaatataaatgcagtgatctatggcttaaaaaatttgtttctgtgacaatgtttgtaaatctagccaatagagtcatttacagaagaaaaatgagcatgtaataatacaagaactgtttccccctcaaaacctgaacctgaattatttgtaaaaactgaaatttaatgattaaagagaagccagaattgtacccttttttgtgaattcttgaacgtactcataaatatgacttattgtattgccttaagttttcactcattgtcttttgaaagccatatgataaaatgattttatttaat

SEQ ID NO: 259 - DNA, 3497 bp, Homo sapiens
ctgtgggatcagagggcacgcctattacaaccagaaaactacaagtataacagcgaggatggatgaacaggctctattagggctaaatccaaatgctgattcagactttagacaaagggccctggcctattttgagcagttaaaaatttccccagatgcctggcaggtgtgtgcagaagctctagcccagaggacatacagtgatgatcatgtgaagtttttctgctttcaagtactggaacatcaagttaaatacaaatactcagaactaaccactgttcaacaacagctaattagggagacgctcatatcatggctgcaagctcagatgctgaatccccaaccagagaagacctttatacgaaataaagccgcccaagtcttcgccttgctttttgttacagagtatctcactaagtggcccaagtttttttttgacattctctcagtagtggacctaaatccaaggggagtagatctctacctgcgaatcctcatggctattgattcagagttggtggatcgtgatgtggtgcatacatcagaggaggctcgtaggaatactctcataaaagataccatgagggaacagtgcattccaaatctggtggaatcatggtaccaaatattacaaaattatcagtttactaattctgaagtgacgtgtcagtgccttgaagtagttggggcttatgtctcttggatagacttatcccttatagccaatgataggtttataaatatgctgctaggtcatatgtcaatagaagttctacgggaagaagcatgtgactgtttatttgaagttgtaaataaaggaatggaccctgttgataaaatgaaactagtggaatctttgtgtcaagtattacagtctgctgggtttttcagcattgaccaggaagaagatgttgacttcctggccagattttctaagttggtaaatggaatgggacagtcattgatagttagttggagtaaattaattaagaatggggatattaagaatgctcaagaggcactacaagctattgaaacaaaagtggcactgatgttgcagctactaattcatgaggatgatgatatttcttctaatattattggattttgttacgattatcttcatattttgaaacagcttacagtgctctcggatcagcaaaaagctaatgtagaggcaatcatgttggccgttatgaaaaaattgacttacgatgaagaatataactttgaaaatgagggtgaagatgaagccatgtttgtagaatatagaaaacaactgaagttactgttggacaggcttgctcaagtttcaccagagttactactggcctctgttcgcagagtttttagttctacactgcagaattggcagactacacggtttatggaagttgaagtagcaataagattgctgtatatgttggcagaagctcttccagtatctcatggtgctcacttctcaggtgatgtttcaaaagctagtgctttgcaggatatgatgcgaactctggtaacatcaggagtcagttcctatcagcatacatctgtgacattggagttcttcgaaactgttgttagatatgaaaagtttttcacagttgaacctcagcacattccatgtgtactaatggctttcttagatcacagaggtctgcggcattccagtgcaaaagttcggagcaggacggcttacctgttttctagatttgtcaaatctctcaataagcaaatgaatcctttcattgaggatattttgaatagaatacaagatttattagagctttctccacctgagaatggccaccagtccttactgagcagcgatgatcaactttttatttatgagacagctggagtgctgattgttaatagtgaatatccggcagaaaggaaacaagccttaatgaggaatctgttgactccactaatggagaagtttaaaattctgttagaaaagttgatgctggcacaagatgaagaaaggcaagcctctctagcagactgtcttaaccatgctgttggatttgcaagtcgaaccagtaaagctttcagcaacaaacagactgtgaaacaatgtggctgttccgaagtttatctggactgtttacagacattcttgccagccctcagttgtcccttacaaaaggatattctcagaagtggagtccgtactttccttcatcgaatgattatttgcctggaggaagaagttcttccgttcattccatctgcttcagaacatatgctcaaagattgtgaagcaaaagatctccaggagttcattcctcttatcaaccagattacggccaaattcaagatacaggtatccccgtttttacaacagatgttcatgcccctgcttcatgcaatttttgaagtgctgctccggccagcagaagaaaatgaccagtctgctgctttagagaagcagatgttgcggaggagttactttgctttcctgcaaacagtcacaggcagtgggatgagcgaagttatagcaaatcaaggtgcagagaatgtagaaagagtgttggttactgttatccaaggagcagttgaatatccagatccaattgcacagaaaacatgttttatcatcctctcaaagttggtagaactctggggaggtaaagatggaccagtgggatttgctgattttgtttataagcacattgtccccgcatgtttcctagcacctttaaaacaaacctttgacctggcagatgcacaaacagtattggctttatctgagtgtgcagtgacactgaaaacaattcatctcaaacggggcccagaatgtgttcagtatcttcaacaagaatacctgccctccttgcaagtagctccagaaataattcaggagttttgtcaagcgcttcagcagcctgatgctaaagtttttaaaaattacttaaaggtgttcttccagagagcaaagccctgaggactggatttccctgtgcctacttcatgatcatgaattccagttaatttataaagaggcgatttttgtgtgccattcacactggtctttttcacattgttttgagcttattgcagtatatgttttgggatttttctgtaaaatgggtgtaattttcctaatacaggtatgtaacaacaaaagaagttgcctgcatgccggtccaaattgttctgtataaagatgctcttaaaagacacaagagttatcctagaaccttaattcttttttatttgaaattttaagtcaagtcctttataaagaccatagcagtggaaaacagtgtactttttaaaaaattgctgaatataaaatctttgaaaattttctttatgtgtgaagacacaaagtatgggggaagacagcaatcaaaactaactttttgtagatagccatttcatttctttaaactgtttcaacgccaatatgtattctacaaaagagaatggttttaggctccagtgttatacttttttttatatatatatataaaaataaactttacgtagtg

SEQ ID NO: 260 - DNA, 5238 bp, Homo sapiens
gaattcggcacgaggtcttcctgtcccggagctaccagcggctcgccgatgcctgtaggggcctcctggcactgctgtttcctctcagatacagcttcacctatgtgcccatcctgccggctcagctgctggaggtcctcagcacacccacgcccttcatcattggggtcaacgcggccttccaggcagagacccaggagctgctcgatgtgattgttgctgatctggatggagggacggtcaccattcctgagtgtgtgcacattccacccttgccagagccactgcagagtcagacgcacagtgtgctgagcatggtcctggacccggagctggagttggctgacctcgccttccctccgcccacgacatccacctcctccctgaagatgcaggacaaggagctgcgcgcggtcttcctgcggctgttcgctcagctgctgcagggctatcgctggtgcctgcacgtcgtgcgcatccacccggagcctgtcatccgcttccataaggcagccttcctggggcagcgtgggctggtagaggacgatttcctgatgaaggtgctggagggcatggcctttgctggctttgtgtcagagcgtggggtcccataccgccctacggacctgttcgatgagctggtggcccacgaggtggcaaggatgcgggcggatgagaaccacccccagcgtgtcctgcgtcacgtccaggaactggcagagcagctctacaagaacgagaacccgtacccagccgtggcgatgcacaaggtacagaggcccggtgagagcagccacctgcgacgggtgccccgacccttcccccggctggatgagggcaccgtgcagtggatcgtggaccaggctgcagccaagatgcagggtgcacccccagctgtgaaggccgagaggaggaccaccgtgccctcagggccccccatgactgccatactggagcggtgcagtgggctgcatgtcaacagcgcccggcggctggaggttgtgcgcaactgcatctcctacgtgtttgaggggaaaatgcttgaggccaagaagctgctcccagccgtgttgagggccctgaaggggcgagttgcccgccgctgcctcgcccaggagctgcacctgcatgtgcagcagaaccgtgcggtcctggaccaccagcagtttgactttgtcgtccgtatgatgaactgctgcctgcaggactgcacttctctggacgagcatggcattgcggcggctctgctgcctctggtcacagccttctgccggaagctgagcccgggggtgacgcagtttgcatacagctgtgtgcaggagcacgtggtgtggagcacgccacagttctgggaggccatgttctatggggatgtgcagactcacatccgggccctctacctggagcccacggaggacctggcccccgcccaggaggttggggaggcaccttcccaggaggacgagcgctctgccctagacgtggcttctgagcagcggcgcttgtggccaactctgagtcgtgagaagcagcaggagctggtgcagaaggaggagagcacggtgttcagccaggccatccactatgccaaccgcatgagctacctcctcctgcccctggacagcagcaagagccgcctacttcgggagcgtgccgggctgggcgacctggagagcgccagcaacagcctggtcaccaacagcatggctggcagtgtggccgagagctatgacacggagagcggcttcgaggatgcagagacctgcgacgtagctggggctgtggtccgcttcatcaaccgctttgtggacaaggtctgcacggagagtggggtcaccagcgaccacctcaaggggctgcatgtcatggtgccagacattgtccagatgcacatcgagaccctggaggccgtgcagcgggagagccggaggctgccgcccatccagaagcccaagctgctgcggccgcgcctgctgccgggtgaggagtgtgtgctggacggcctgcgcgtctacctgctgccggatgggcgtgaggagggcgcggggggcagtgctgggggaccagcattgctcccagctgagggcgccgtcttcctcaccacgtaccgggtcatcttcacggggatgcccacggaccccctggttggggagcaggtggtggtccgctccttcccggtggctgcgctgaccaaggagaagcgcatcagcgtccagacccctgtggaccagctcctgcaggacgggctccagctgcgctcctgcacattccagctgctgaaaatggcctttgacgaggaggtggggtctgacagcgccgagctcttccgtaagcagctgcataagctgcggtacccgccggacatcagggccacctttgcgttcaccttgggctctgcccacacacctggccggccaccgcgagtcaccaaggacaagggtccttccctcagaaccctgtcccggaacctggtcaagaacgccaagaagaccatcgggcggcagcatgtcactcgcaagaagtacaacccccccagctgggagcaccggggccagccgccccctgaggaccaggaggacgagatctcagtgtcggaggagctggagcccagcacgctgaccccgtcctcagccctgaagccctccgaccgcatgaccatgagcagcctggtggaaagggcttgctgtcgcgactaccagcgcctcggtctgggcaccctgagcagcagcctgagccgggccaagtctgagcccttccgcatttctccggtcaaccgcatgtatgccatctgccgcagctacccagggctgctgatcgtgcgccagagtgtccaggacaacgccctgcagcgcgtgtcccgctgctaccgccagaaccgcttccccgtggtctgctggcgcagcgggcggtccaaggcggtgctgctgcgctctggaggcctgcatggcaaaggtgtcgtcggcctcttcaaggcccagaacgcaccttctccaggccagtcccaggcggactcgagtagcctggagcaggagaagtacctgcaggctgtggtcagctccatgccccgctacgccgacgcgtcgggacgcaacacgcttagcggcttctcctcagcccacatgggcagtcacggtaagtggggcagtgtccggaccagtggacgcagcagtggccttggcaccgatgtgggctcccggctagctggcagagacgcgctggccccaccccaggccaacgggggccctcccgacccgggcttcctgcgtccgcagcgagcagccctctatatccttggggacaaagcccagctcaagggtgtgcggtcagaccccctgcagcagtgggagctggtgcccattgaggtattcgaggcacggcaggtgaaggctagcttcaagaagctgctgaaagcatgtgtcccaggctgccccgctgctgagcccagcccagcctccttcctgcgctcactggaggactcagagtggctgatccagatccacaagctgctgcaggtgtctgtgctggtggtggagctcctggattcaggctcctccgtgctggtgggcctggaggatggctgggacatcaccacccaggtggtatccttggtgcagctgctctcagaccccttctaccgcacgctggagggctttcgcctgctggtggagaaggagtggctgtccttcggccatcgcttcagccaccgtggagctcacaccctggccgggcagagcagcggcttcacacccgtcttcctgcagttcctggactgcgtacaccaggtccacctgcagttccccatggagtttgagttcagccagttctacctcaagttcctcggctaccaccatgtgtcccgccgtttccggaccttcctgctcgactctgactatgagcgcattgagctggggctgctgtatgaggagaagggggaacgcaggggccaggtgccgtgcaggtctgtgtgggagtatgtggaccggctgagcaagaggacgcctgtgttccacaattacatgtatgcgcccgaggacgcagaggtcctgcggccctacagcaacgtgtccaacctgaaggtgtgggacttctacactgaggagacgctggccgaggccctccctatgactgggaactggcccaggggccccctgaacccccagaggaagaacggtctgatggaggcgtccccagagcagcgccgcgtggtgtggccctgttacgacagctgcccgcgggcccagcctgacgccatctcacgcctgctggaggagctgcagaggctggagacagagttgggccaacccgctgagcgctggaaggacacctgggaccgggtgaaggctgcacagcgcctcgagggccggccagacggccgtggcacccctagctccctccttgtgtccaccgcaccccaccaccgtcgctcgctgggtgtgtacctgcaggaggggcccgtgggctccaccctgagcctcagcctggacagcgaccagagtagtggctcaaccacatccggctcccgtcaggctgcccgccgcagcaccagcaccctgtacagccagttccagacagcagagagtgagaacaggtcctacgagggcactctgtacaagaagggggccttcatgaagccttggaaggcccgctggttcgtgctggacaagaccaagcaccagctgcgctactacgaccaccgtgtggacacagagtgcaagggtgtcatcgacttggcggaggtggaggctgtggcacctggcacgcccactatgggtgcccctaagactgtggacgagaaggccttctttgacgtgaagacaacgcgtcgcgtttacaacttctgtgcccaggacgtgccctcggcccagcagtgggtggaccggatccagagctgctgtcggacgcctgagcctcccagccctgcccggctgctctgctctcgttaccgaccactaggggtggcagggccgccccggccatgtttacagccccggccctcgacagtactgagccccgagcccccagcacttgtgtgtacagcccccgtccccgccccgccccgcccggccggccctaacttattttggcgtcacagctgagcaccgtgccgggaggtggccaaggtacagcccgcaatgggcctgtaaatagtccggccccgtcagcgtgtgctggtccacgggctcaggcgagtttctagaaagagtctatataaagagagaactaacgccaaaaaaaaaa

SEQ ID NO: 261 - DNA, 6450 bp, Homo sapiens
cggcctggtccgggccatgtccgcgtgaggaccccgccgctgtcgccgctcccgttccggccctggcccctctgcccggcagcgcggcgcaccatgggctccattctcagccgccgcatcgcgggggtggaggacatcgacatccaggcgaactcggcctatcgctaccctccgaagtccggaaactactttgcttcgcactttttcatgggaggagagaaattcgacaccccccaccctgaaggttacctctttggagagaacatggatctgaacttcctgggcagccgcccggtccagtttccctacgtcactcctgccccccacgagcccgtgaagacgctgcggagcctggtgaacatccgcaaagactccctgcggctggtgaggtacaaagacgatgccgacagccccaccgaggacggcgacaagccccgggtgctctacagcctggagttcaccttcgacgccgatgcccgcgtggccatcaccatctactgccaggcatcggaggagttcctgaacggcagggcagtatacagccccaagagcccctcgctacagtccgagaccgtccactacaagagaggggtgagccagcagttctccctgccctccttcaagattgacttctcggaatggaaggatgacgagctgaactttgacctggaccggggcgtgtttccagtagtcatccaggctgtggtggacgaaggagatgtggtggaagtgactggccacgcccacgtgctcttggctgcctttgaaaagcacatggacggcagcttctctgtgaagcctttaaagcagaagcaaattgtggaccgggtcagctacctcctgcaggagatctatggcattgagaacaagaacaaccaggagaccaagccctcggacgacgagaacagcgacaacagcaacgagtgtgtggtgtgcctgtccgacctgcgggacacgctgatcctgccctgccgccacctgtgcctctgtacctcctgcgccgacacgctgcgctaccaggccaacaactgccccatctgccggctgcctttccgggccctcctgcagatccgggcggtgcggaagaagccaggagccctgtcccccgtgtccttcagccccgtcctggcccagagcctggagcatgatgagcactcttgtccctttaaaaaatcaaagccgcaccccgcctccctggccagcaagaaacctaaaagggaaacaaactctgacagcgtcccacctggctacgagcccatctcgctgctcgaggcgctcaacggcctccgggctgtctccccggccatcccctcggcccctctttatgaagaaatcacctattcaggcatctcggacggcctgtcccaggccagctgtcccctcgcggctatcgaccacatcctggacagcagccgccagaagggcaggccgcagagcaaggcccccgacagcaccctacggtccccgtcttcccccatccacgaagaggatgaggagaagctctccgaggacgtggacgcccctcccccactgggtggcgcagagctggccctgcgggaaagcagctcccctgagagtttcataacagaagaggttgatgagtcgtcgtcaccacagcaagggacccgagcagcttccattgagaatgtcctgcaggacagcagccccgagcactgtggccgaggcccacctgctgacatctacctgccagccctggggcccgactcctgctctgttggtatagacgagtaagccggtacgtgaccttccagacgcgcttcgggggctctgacgcgcgtccttggagagaggagccctcccctgctctctggcgggggttccttctggtttttgggtcttcgtccgcatccgcatcttcccaggggccctggattccgaatccagagctctccagtggctgctgcaccttcccccagaaagtggcctcctggggggtcctgactttcggggccagaggtctctccatctggactaggcggccggtcaggctcttcttccagccttgaggggccctggaacagtcccagcccaggcagggagacagacacagcccaggtgcgccagagccactgtccactgcgggaggcaggagcttgagggatgagggcagcaccgtggagggaaccccagggagacatggggtgagcgtcccaaggggagaggcctgggcctggccttgttccggatggtcccaccatgagttcgcatcggtcctgcagcagacacgttaggacgctcagcaggtccactcccgtgttccggtcatggctttaacaattcatggggaaagaatgcgccccgattgggagagcccctggatcacgtcttcccaagctcagtccctgtctcttggagggagtccgtcctcgaggggccctctggtgcccaggggagagtatcttgcgtcctgtcctgagggcgtccgctcacacagccacctgctcccccgctccctccttcccttgtcagcatggccaccgtgggcctggcatcaccatgggcctggcacacagtccctcgtgggctgcctttgtgccatgagcccactgctgccgactcacctgtccctcccagtactggaaccttctggaacaccagcactaaaagataggaggccctgtgaggttggcatcccccatccccccccaagaggtgccctctaccagggtggcccaggtgagtgttttacagaaggcggctctgtccaggcagtggttcgcacctataagcccggtactttgggagaccgaggggatagatcacttgagcccaggaattcaagatcagtgtagaaaacatagaccccctctctataaaaaataaaaaattggcttgggcgtggtagcttgtgcctgtggtcccagctactcaggggtgctgaggtgggaggattgccggagctggggaggtcaaggcccactccagcctgagacgctgtctcaataaaaaaaaatacacacacacccacccacccactccagcctgagaccctgtctcaagaaaaaaaaaaatacacacacacacacacacacacacacacacacacacacacacacacacacacgggggagagagagaaggcagctccaggagtgccaccaaaatgtaggcagacggattggggaccctctgccttcccagagggtcttggcacacaagctgcgtgcagctctggtctgccgaggcccatgcagcctgctgggaggtgcctggccgggggtgcaggctctaagaggccctttccccttgggtggacttgagccgggtcagggagaacttcgcttcttttgactgcgctctgcattcccatgaacctctgtcttcttgagcccagcgagtccctctgttgacccctgtcctgagccattatacccctagattgaaacagtcagcacctttcagacggccccggcctgcgcatcggtggaaggtgccatgcgaatgtcacgattcaggtcaagcttccggagctggggagtgcaggtgtgatctagaacagggctcacagcctcggaaacctgctctcgccgcggcccccgaagaaaatagacgcccttcaccggagagtggggcctgggccgtgtctgctgggagccatgtgtcagggctggtggctgggtgtcaggcagccctgaggccatgctggccccgtcccaggctctgcaccagcaccattgcccaagccccagggacgccagacccatccggggacagcgcccggcggcgtcgtgcaggccacagtctgggcattggggctctgtgggaggctcctctctttgccttgcagtagccatccgggggctactctgagcacgggcttgttctcacccagggccgctcccgacccctgcaccctgggttgaccgagttccaccctaacccagccgtaagaaccttggcaggacagtggctggccacatcccaggaaaccggaaccagggcaagggcaggaggcccagagggcatccactgcggtgccgtgtcgcgctctgactcggggctgcagatctgctgtgggtgtccggggatctgggatcgtctgtcccaagagggacacagcgtatttggcacagttagggagtccccgggcccttggtgtgctcacatctgagtgaatgctgttgtggccacaggcggcgggagtgggggtgctggatggcccagcccctctggggctccagatcggtaggagcgggtggcgtggcaccaggcatccgagtgtgaccctcctccctctgctcccacctgcaggacggcccacctccatggagacggcccacggcctcgccaccaccagccccacctggcctccacttggtggccccagccccgatcccagcgccgccgagctgaccccactctgagagcctggccgagctggcagcatggagccctcggctccccagactttgccgaggggctgctccggaccccgttgtgagccggcctcctgtctgcatgccccctgtggccaccaggctccgaggggccgtggtgactcttgatcaaagagcacagtgaactgtcccttctgagtctcccttttctacagttgatatatttgtaactggtacaagatgaaggacagcagctttccatccctagttcagagcccccgttccccagggtcctgtgggctgagcggctggggctggggctgcccacgtgtggcctccgctggctctgcctgctcctgcaacagtgcggtccctgcccggagaactcaggaggcctgcagaagagaactgattggtggtcgaagcaccatcttcacagatgttcaggggcagtggggggctccaggcacggtcaatgaaggaaacagtgcctgtccacccaccctgcgtgtcactgtggcggcctggctgtcgctgctttttgtcctctgccgtgtttgcgcggcctcagtgccctccctggtgcgtctgcgctggggccctcagtgctcggggccttggggtgcatgggcgccgccctgggcagctagagtgtctcagcccggtgctgggcctggccgaggggcggaggcacagctgcttccagcagccagcattcagtggccttgtcaccaagctccacacctcctcctggtgctggctttggtgacatcacaaggcccctccaggtgcaggggcttctgtttggcaggcccctgccagggaggacctggtggcctcctcattctcttttgccattggaatgtccccttgcagttctcttctctttttttttttttttgagatggagtttcactcttgctgcccaggctggagtgcagtggctcaatctcgggtcactgcaacctccgcctcccgggttcaagtgatcgtcctgccttaggctcctgagtagctggggattacaggtgcctaccagcatgctcggctaatttttttgtatttttagtagagaagggatttcaccatgttggccgggctggtctcaaactcctaaggtcatccacctgcctcggcctcccagagtgctgagattacaggcgtgagcctccgcgcccggcccccttgcagttctctctgatttggtttgttctgtctcaggcttctgtggcaggactggcccagggaggaggaagccagcagcacacctggggaatggggtcccggccgggaggcttggcctctgggcgacctcgtcctgttttgtttgtttgtttgtttgtttttttaaaggtaaacctcctgggccgcagatggcaaagggagtgcctgggcctggtgacccagggctggatccacccctgcggagccctgggccaggcaggtgtctgctgctcacctggctctggagggctgccctgcagctgggcctggggacaggtcggctgtggggcagctcagtaccctccctgaggctcacggtggctccgagcatgagctctgcctcctgggcgagacccagcagtggacagcacggtcctcacacccagctccctgcacacccaggccagccacccctcccgctcgtgcacaggcacgcagatgcgctcacacgtacacacacacaaatgcacgcccacttgcacatgctcacgcacacgttcacacatgcacactcacgctcacacatgctgtcacgcatacacacacgcacatactcctgcacatgttcccatgcatgtgtgtgcactcggaccgagcatctcccacgcacctctaccccaccccaagcacctctctccccccatgcacctctccccaacaacacacacagccccctgcaccgcccgccccccgcccccaccaaggccccagcctctggccatcagtcctggtgccagagctttgcgtgaagttcgggccgcagagtggcccgctgggactcccatgtgctgccgtctgatgtgctcagatgggctcatcgttggttcgtttttactgtatatttatagtaataaaatcatgcagcaat

SEQ ID NO: 262 - DNA, 4611 bp, Homo sapiens
gtgtcgctcgctttctgtcagcctctctccctctccctctcccctctccttcctctcgcttcctctctcgcacctgagcgtacgcacctgcccgggcccggctccctcctcctctcccctccctctttccccgcccggccgcgggagcctcgtggctgcgtcaccgccgcccccccagacaagatggacaccgcggaggaagacatatgtagagtgtgtcggtcagaaggaacacctgagaaaccgctttatcatccttgtgtatgtactggcagtattaagtttatccatcaagaatgcttagttcaatggctgaaacacagtcgaaaagaatactgtgaattatgcaagcacagatttgcttttacaccaatttattctccagatatgccttcacggcttccaattcaagacatatttgctggactggttacaagtattggcactgcaatacgatattggtttcattatacacttgtggcctttgcatggttgggagttgttcctcttacagcatgccgcatctacaagtgcttgtttactggctccgtgagctcactactgacgctgccattagatatgctgtcaacggaaaatttgttggcagattgtttgcagggttgttttgtggtgacgtgcacactgtgtgcattcatcagcctggtgtggttgagagagcagatagtccatgggggagcaccaatttggttggagcatgctgccccaccgttcaatgctgcggggcatcaccaaaatgaggctccagcaggaggaaatggtgcagaaaatgttgctgctgatcagcctgctaacccaccagctgagaacgcagtggtgggggaaaaccctgatgcccaggatgaccaggcagaagaggaggaggaggacaatgaggaggaagatgacgctggtgtggaggatgcggcagatgctaataacggagcccaggatgacatgaattggaatgctttagaatgggaccgagctgctgaagagcttacatgggaaagaatgctaggacttgatggatcactagtttttctggaacatgtcttctgggtggtatctttaaatacactgttcattcttgtttttgcattttgcccttaccatattggtcatttctcccttgttggtttgggatttgaagaacacgtccaagcatctcattttgaaggcctaatcacaaccatagttgggtatatacttttagcaataacactgataatttgtcatggcttggcaactcttgtgaaatttcatagatctcgtcgcttactgggagtctgctatattgttgttaaggtctctttgttagtggtggtagaaattggagtattccctctcatttgtggttggtggctggatatctgttccttggaaatgtttgatgctactctgaaagatcgagaactgagctttcagtcggctccaggtactaccatgtttctgcattggctagtgggaatggtatatgtcttctactttgcctccttcattctactactgagagaggtacttcgacctggtgtcctgtggtttctaaggaatttgaatgatccagatttcaatccagtacaggaaatgatccatttgccaatatataggcatctccgaagatttattttgtcagtgattgtctttggctccattgtcctcctgatgctttggcttcctatacgtataattaagagtgtgctgcctaattttcttccatacaatgtcatgctctacagtgatgctccagtgagtgaactgtccctcgagctgcttctgcttcaggttgtcttgccagcattactcgaacagggacacacgaggcagtggctgaaggggctggtgcgagcgtggactgtgaccgccggatacttgctggatcttcattcttatttattgggagaccaggaagaaaatgaaaacagtgcaaatcaacaagttaacaataatcagcatgctcgaaataacaacgctattcctgtggtgggagaaggccttcatgcagcccaccaagccatactccagcagggagggcctgttggctttcagccttaccgccgacctttaaattttccactcaggatatttctgttgattgtcttcatgtgtataacattactgattgccagcctcatctgccttactttaccagtatttgctggccgttggttaatgtcgttttggacggggactgccaaaatccatgagctctacacagctgcttgtggtctctatgtttgctggctaaccataagggctgtgacggtgatggtggcatggatgcctcagggacgcagagtgatcttccagaaggttaaagagtggtctctcatgatcatgaagactttgatagttgcggtgctgttggctggagttgtccctctccttctggggctcctgtttgagctggtcattgtggctcccctgagggttcccttggatcagactcctcttttttatccatggcaggactgggcacttggagtcctgcatgccaaaatcattgcagctataacattgatgggtcctcagtggtggttgaaaactgtaattgaacaggtttacgcaaatggcatccggaacattgaccttcactatattgttcgtaaactggcagctcccgtgatctctgtgctgttgctttccctgtgtgtaccttatgtcatagcttctggtgttgttcctttactaggtgttactgcggaaatgcaaaacttagtccatcggcggatttatccatttttactgatggtcgtggtattgatggcaattttgtccttccaagtccgccagtttaagcgcctttatgaacatattaaaaatgacaagtaccttgtgggtcaacgactcgtgaactacgaacggaaatctggcaaacaaggctcatctccaccacctccacagtcatcccaagaataaagtagttgtctcaacaacttgaccttcccctttacatgtccttttttgtggacttctctctttggagatttttcccagtgatctctcagcgttgtttttaagttaaatgtatttgacttgtgttctcagcattcagagagcagcggtgtaagattctgctgttctccctggatcttctgacattactgctgtctgagatttgtatatgtgtaaatacaagttccttgataccctaaaaccttggattaaacagaatgtgcattgtacatctttaaacaaaatgtatattaatttattaaatctagttgtcactttattttggacctgctgtgatctcgacaggaaacgtgccacagagcagtagtgcgcaggcaagacttttcagtgacgccttgtggaacgcagttcatgatgtcctagcagctctcactaagggaactgtacattctttctttcttggctattcagaccttaccaagaacgttaaaggaaacaagtagaaatcagcagtggagtgtctgtggtaagaaaacatgaactttatgcttcactgttagttgtttgtggaagttattttgtataacaccaaagctgttgtacatttcctactgcctgatttttttcatgtgtctgtgtttgtaatattgtatagtatcttgtgctaggtgaggaaattatttttaattttgataatttaatattcctagtgtgatcagcattgggagttgggtttcagtggggcatgtctatacttagagaaaaaaagtccaaatgaagattttcatgagtcagcccccccgcccgcccccaccccacacccacatcctctcttttccacacacaactatctgtttattttttgtagcagtggccgaaagtcctgcaaggtcataaatctttcagagtgacatcaccaactgtactgcatcttactggatttaggacttctgagatgcttgtgaagtatagatgtggttgtggtcttagattgacagcattagagaagactggttagaacatctggtctcgctggttagtgcctcgttggctgaggactaggtgtgcatttctcctagcttttcatcaggaaatcccaaagtttccaaagctttttgtttacagaataaaacttcaaataaaaccaattcattatttgtccagaaggaagcttggctgagctggccttttaacataggaatgtatttcgttggaaacattctgaaaaatctcagagaactgaacccttacaaactttgttttccctcataaccaaagcttcaggttagaagtttagaaaaatagaatggttgggtacatgatctaaatgtttaatgctaaaggtatatcgtaagggtagtgtttgtttttgaacgataatttagaagttctcatagaaagcgtataacataggtcttcagaaactataaaagaattttcatatagtattaaaatccatagactaaaatctgagaattttttaacatatgcaagtcagccaaacataagctaccaaaataaagagcaatgtgttctggctgttttatacttcaacaattttttccctaagtggtaagcaattactttaaaacatatttttaaaaacatcggtatcgggagctgcggtggctccggccggttgtcctggcacacaaggaggcgaggctatgcgttcgaggccaacctaggcaaaattgg

SEQ ID NO: 263 - DNA, 3074 bp, Homo sapiens
ccgctctccgctgcgggggaggccatggcggaaccttcccaggccccgaccccggccccggctgcgcagccccggccccttcagtccccagcccctgccccaactccgactcctgcacccagcccggcttcagccccgattccgactcccaccccggcaccagcccctgccccagctgcagccccagccggcagcacagggactggggggcccggggtaggaagtgggggggccgggagcgggggggatccggctcggcctggcctgagccagcagcagcgcgccagtcagaggaaggcgcaagtccgggggctgccccgcgccaagaagcttgagaagctaggggtcttctcggcttgcaaggccaatggaacctgtaagtgtaatggctggaaaaaccccaagccccccactgcaccccgcatagatctgcagcagccagctgccaacctgagtgagctgtgccgcagttgtgagcaccccttggctgaccacgtatcccacttggagaatgtgtcagaggatgagataaaccgactgctggggatggtggtggatgtggagaatctcttcatgtctgttcacaaggaagaggacacagacaccaagcaggtctatttctacctcttcaagctactgcggaaatgcatcctgcagatgacccggcctgtggtggaggggtccctgggcagccctccatttgagaaacctaatattgagcagggtgtgctgaactttgtgcagtacaagtttagtcacctggctccccgggagcggcagacgatgttcgagctctcaaagatgttcttgctctgccttaactactgggagcttgagacacctgcccagtttcggcagaggtctcaggctgaggacgtggctacctacaaggtcaattacaccagatggctctgttactgccacgtgccccagagctgtgatagcctcccccgctacgaaaccactcatgtctttgggcgaagccttctccggtccattttcaccgttacccgccggcagctgctggaaaagttccgagtggagaaggacaaattggtgcccgagaagaggaccctcatcctcactcacttccccaaattcctgtccatgctggaggaggagatctatggggcaaactctccaatctgggagtcaggcttcaccatgccaccctcagaggggacacagctggttccccggccagcttcagtcagtgcagcggttgttcccagcacccccatcttcagccccagcatgggtgggggcagcaacagctccctgagtctggattctgcaggggccgagcctatgccaggcgagaagaggacgctcccagagaacctgaccctggaggatgccaagcggctccgtgtgatgggtgacatccccatggagctggtcaatgaggtcatgctgaccatcactgaccctgctgccatgctggggcctgagacgagcctgctttcggccaatgcggcccgggatgagacagcccgcctggaggagcgccgcggcatcatcgagttccatgtcatcggcaactcactgacgcccaaggccaaccggcgggtgttgctgtggctcgtggggctgcagaatgtcttttcccaccagctgccgcgcatgcctaaggagtatatcgcccgcctcgtctttgacccgaagcacaagactctggccttgatcaaggatgggcgggtcatcggtggcatctgcttccgcatgtttcccacccagggcttcacggagattgtcttctgtgctgtcacctcgaatgagcaggtcaagggttatgggacccacctgatgaaccacctgaaggagtatcacatcaagcacaacattctctacttcctcacctacgccgacgagtacgccatcggctacttcaaaaagcagggtttctccaaggacatcaaggtgcccaagagccgctacctgggctacatcaaggactacgagggagcgacgctgatggagtgtgagctgaatccccgcatcccctacacggagctgtcccacatcatcaagaagcagaaagagatcatcaagaagctgattgagcgcaaacaggcccagatccgcaaggtctacccggggctcagctgcttcaaggagggcgtgaggcagatccctgtggagagcgttcctggcattcgagagacaggctggaagccattggggaaggagaaggggaaggagctgaaggaccccgaccagctctacacaaccctcaaaaacctgctggcccaaatcaagtctcaccccagtgcctggcccttcatggagcctgtgaagaagtcggaggcccctgactactacgaggtcatccgcttccccattgacctgaagaccatgactgagcggctgcgaagccgctactacgtgacccggaagctctttgtggccgacctgcagcgggtcatcgccaactgtcgcgagtacaaccccccggacagcgagtactgccgctgtgccagcgccctggagaagttcttctacttcaagctcaaggagggaggcctcattgacaagtaggcccatctttgggccgcagccctgacctggaatgtctccacctcggattctgatctgatccttagggggtgccctggccccacggacccgactcagcttgagacactccagccaagggtcctccggacccgatcctgcagctctttctggaccttcaggcacccccaagcgtgcagctctgtcccagccttcactgtgtgtgagaggtctcctgggttggggcccagcccctctagagtagctggtggccagggatgaaccttgcccagccgtggtggcccccaggcctggtccccaagagctttggaggcttggattcctgggcctggcccaggtggctgtttccctgaggaccagaactgctcattttagcttgagtgatggcttcaggggttggaagttcagcccaaactgaagggggccatgccttgtccagcactgttctgtcagtctcccccaggggtggggggtatggggaccattcattccctggcattaatcccttagagggaataataaagctttttatttctctg

SEQ ID NO: 264 - DNA, 6184 bp, Homo sapiens
ggcgaggggtgcacggcggccacctgagtggcgcggcggtgtcaggttcttgctcaagtaccaactctatggacccaggacaggtttgtcccatgacctgctgtgaacagtgtgttgtctgatagaagattcggttggcaaaccatctctctattgccttacagagcaagcaaagaagatggatcgattgaagagccatctgactgtgtgctttctaccttctgtgccctttttaatcctagtatccactctagccaccgctaagagtgtgactaacagcactttaaatggcactaacgtggtcttgggctctgtgcccgtaatcattgccagaactgaccatatcatagtcaaggaagggaacagtgccttgattaactgtagtgtttatggcatccctgacccacagttcaagtggtataattccattggcaagctgctgaaagaagaagaggatgagaaggagagaggaggaggaaaatggcaaatgcacgacagcggcctcctgaacatcaccaaggtatccttctcagaccgaggtaaatacacgtgtgtggcttctaacatctacggcaccgtgaacaacacggtgaccttgcgcgtcatcttcacttctggagacatgggtgtctactacatggtcgtgtgcctggtggccttcaccatcgtcatggtcctcaatatcacccgcctgtgcatgatgagcagccatctaaagaagactgagaaggccatcaatgagttctttaggaccgaaggtgcagagaagctgcagaaggcatttgagatcgccaagcgcatccccatcatcacctccgccaaaactctagagcttgccaaagtcacccagttcaaaaccatggagttcgcccgctacatcgaagagcttgccaggagcgtgcctctgccgcctctcattatgaactgcaggactatcatggaggagattatggaggtggttgggctggaggagcaggggcagaattttgtgaggcatactccagagggccaggaggccgcagacagggatgaggtctacacaatccccaactctctgaagcggagcgactcccctgccgctgactcggacgcctcatcgctgcacgagcaacctcagcaaattgccatcaaggtgtcagttcacccgcagtccaaaaaagagcatgcagatgaccaagagggtggacagtttgaagtcaaagatgtagaggagacagaactgtcggcggaacattcccccgaaactgcagaaccttctaccgatgtcacgtccaccgagctaacatctgaagagccaacacctgttgaggtaccagataaggtactgccgccagcttacctggaagccacagagccagcagtgacacatgacaaaaacacctgcattatttacgaaagccatgtctaataccaaccccgaaaagctatgcatatcaagaaaatcaggggctgctccttgtaatacagatgtagtacgcacttgccgctaagccttaccaggagactctcatcccttaggtaggagtgatgccactttaaaaggagaaacacctgcctgcagtgaatgggactggaatttccccagtagagaagggtgcgagaaacatcagggtgcagaattgataccagacagaaggtgtctatgtgataatgagtttcagaggctgatctctgccaaataccttaattggtgatgccttcttggcaaagagtacaccactgtaagatattctgagttcaagaaccctgtccagtgccccctgcattgcttttccttttaaaaagtataggtctgctacaatagcaaatgcacgtacgtgggttttttgcagtttcttctcagttttaattttgcttttcctttataatggggtcattgttattaatactaattgttctttctggtttagtcctcattgccacttttgtccttatgtttccctagaacacgtacctcagagactttggtatcagtcaccagtaccagggctgatatctacaagtcacattacatttgtcatgttccaaagtagttacgaggcttgttatttttttttcattccccaggcctatttccatagatagctttttttgtttgtttccaacgaagctgctgttaaacgaaactgagaaaaactttgccccggaatagcactttaatagtcaaaaatgtgtttacctgtctgattgagtgagccttttggtgagctcagctgagatgtagagggagattgtaaaaggttaaatatacccacaccacccatgaaagtcactgtttaagttacatcatcctccaaataaagactgattctttacctggaaaatatattgcttccaaagacatcagattcagtggattcctgtaggttatagaatattggcttccaaacaggcttgcagggaccatatgctgttggatgacatataaccaggtccacttttatgaactgcatagctgacttggttgtccttaaagaggaaagcgaaaggttagggtaatagcaaagggaactgtgccatcagattttatgccaaaactgttgaataattatgcagtcctgcaagaaagtggttatatgtgaggtgcgtgatgttatggaaagaagacaaaattagtcatccaaaggcttaatacccactgtgccaataaccagctgcctggctttggacaagtctggacctcaggtcccttatctgtagaaggggcagatgacatgagctctgagcactgttgaaatggtatcactgtcacacagaaccaaaccaatattcacatccttgctccttttcacaatgactttaaagatttttgctttcatctcttggtccacctaacattttcatgcttcattacttaaataagaatgttggttttgagaaatagcattttaaacaaattgtggatcttctccttccaaaaaaaccattaggaccacatctgcaattaagatttaatattggtgagaatgagtggttttatttaattttcccttaaaagcaaaggagacagtaatcttaataaattcataggggccgtggccacatcaggtaatggggttatgatgtccaagattgcatggatcacattggtgatgagagcagacccagatgtttagtcctcactctgtcaccatctgaggaggtgaccttggacaactcccttcctctctctgggatttaatctttttcatctgtaaaatatgcaggtagtactcgagggtctacaggatcccttctagttgaaacatttatagttcacagaaagtttgcagtcttccaggataaccaacccccgttgcatgagacaagcaaaaaatgggtccatgaaattggatacttttgccatccaaactttacaacaaacattatctggctctgtaattgagagcagtgggcttggttttaaacctagccttgattagtttgtttatagataactgttgtggaaggtgatagaactagtcatggagtttgatgagacatctcttgaaaaggactgaactgttgacttctggttagaagtgctttgggcagtcacataaagaaatgagcagtgagaaatcaggagaaattatgactcctgttgggctttctggactagcattgtatgtttttgggttgcagaaaagttttaacaccacctcttagaatataaaaattttccagttgtcatggaggtccacagattcattaccatgggtttatatgcccaaagcaacaacagaggacttaagttcattttgtgatactgtatggatgttaccccatcctattcagttgtcattccacccaaacccatgtgtaggtttccacatggaaaggagaaggcatccattccacctagacattgaatagtgataataagctaaaagtgggcagattttcagtggagcaagagcagaaatatgcggccaaagaatgtttcctgattggttttgctgctttagactgcagtggggagagcttatgtagattttcaaaactttctccctctttaaggcatcataatgctctcggttttgataacaactgacataaagggaggttgacttaaaatgggaatttctccttccaaaaatgctacactcttcctatccatcctacagcttctttatgaaatgagaggccctcctgctagaatatgaaatgcagaagacctcatgactttcagctgatttttcaaagataaagtgaactgttcagcttcatagaaattcatgcgagtgtgactgaacgtgtgtgcatacacactcgtgcacattggactcatttgggcagttttaaaagcttcacactaaatccaaagcctcgtcctttgggtcgtatgtagtcgtttgtaaaatcaatttctggcttctgagtcatcctggtcatatctctagcaatgtttttcttgaaattctgaaaatgattcacatatgtgtgtacatttaattcacttagatgatctgtaaacttggatggtatttattctaaatggggaaaacaattttatatggaaaaatctatgtaatttataatggttttgttttatatattatattttcatatctctagggcacatctatcctcatctttttgtataccatacttagcaaaaagaaatactaatacttgactaaaatctctaggaaccaaacgtgatacatgtgatatatagcttctagaaatcgctctaaaaatctctgaatgtctcatccatcccaagcattattgtgctgtgtcattatgtccagaatgatttgtcttggatgcttatgagcatttgtttttcacaactaaggttgaaagacctgacatctcacacaatggggttctggaattcccctttcctcctttatctgtttttattgtttgtttcatttttaattgcaccagtctatgttgtcgaaactttgttttgaagggcaaatgtgagataacaagaaagcaatgtgatggaaagactggatgaatttacctatggctatgtaaattattttaatggactgataagatgtttcaagtctcatgcttggatctttatttattggtgatctaggatctgctcagctctttagcacatgaagaaaatcaggtacaaaggacatttgcatgtttggaacagcatgctctaagccccgtgcagccaacacaaattaacttgactgtagaaacaccaattccagctgctggaagaaatggtttagaaaggcaaaccagataccttttattctgccctaggaaatacagtgttgatcagtgctaaaactcttcagtggcagtcactgtggttcttttaactggggatttcctttcagtgtttcatttggtaccaaaacagaacatttaccttacatttcagatactctgttttctcagcattgttcagatactttcctttaccgctcttcacgtacccttttggcattgagtaattctataaatgtttctatccttggtttttaaaccaagttattcatactcttaaaatatctaccaaatctcattgtattttcacatattttgagcatcaagatactggtcattttaaaaaatccttcagtaaatagcacagtttattttcctaatgacatttttagggtttcttcattgatcaaccaggtttgggttacacaaatcaattgtgggggaaaaatcaaataaaacaattgcttattatattttccaaaggactgagcatttatcttttattcacgaagatatcatatgaggatgataatgatctttaacagattttttagagatagaatttataaagaggctgatactaagaatactacaatcaaaattgaagctagagaatgtaaaaatagaaagtaaatagttctaagaatattctggcataaattatttttatttagccaataaaatagcctccaaatgtatatctcagacaccatagagctgctaacaatgagaatcaaggaagatgcttgcacttagatttcgtttgttgtatttcagtagttctggatgtcctttgttaaaattggaaaatggaaaaatgtctcgacagaaatgtcaatctggtgattctgtgaactgtaaaatgttcacttttaaaaataaagttgtaaacaagttactcatataagttggtattacagtagcaaaaacagaaaaccatgtgatccatcctgtattttgattgatgctttaataaagggtttgcacagctgtg

SEQ ID NO: 265 - DNA, 4959 bp, Homo sapiens
gaggtggcgacctcacagtcctgatggccctcgttctgcaggctggcgggaacacatggaacgacgtcggaggtttgagtttgattttcgagatagagatgatgaacggggttaccgaagggttcgctctggcagtgggagcatagatgatgacagggatagcttgcccgaatggtgcttagaggatgctgaagaagaaatgggtacatttgactcatctggagcattcctttctctaaaaaaagtacagaaagagcctattccagaagagcaggagatggacttccggcctgtggacgaaggggaggagtgctctgactctgagggtagccataatgaagaggccaaagaacccgataagacaaataagaaagaaggagagaaaacagatagagtaggagttgaagctagtgaggaaactccccagacctcatcatcatctgctagaccaggtactccttcagaccatcagtctcaggaagcatcacagtttgagaggaaagatgaaccaaaaactgagcaaacggaaaaagctgaagaggagactcggatggaaaatagtctaccagccaaagtgcccagcagaggggatgaaatggttgctgatgtccagcagcccctgtcgcagattccttcagatacagcctctcctcttctcatacttccacctcctgttcccaatcctagtcctactctccggccagttgaaacaccagttgtaggtgctcctggtatgggcagtgtttccacagaacctgatgatgaagaaggtctcaaacatttggagcagcaagctgagaaaatggtggcttatctccaagacagtgcactagatgatgaaagattggcatcaaaactgcaagagcacagagctaaaggagtgtcgattccattgatgcatgaagcaatgcagaagtggtattacaaagatcctcagggagaaattcaaggtcccttcaataatcaggagatggcagaatggtttcaggcgggctattttactatgtctttattggtgaagagagcgtgtgatgaaagcttccaacctcttggcgatatcatgaaaatgtggggaagggttcccttttctccaggtccagctccccctcctcatatgggagagctggaccaggaacgactgaccaggcagcaagaactcacagccttataccagatgcagcacctgcagtaccagcagtttttaatacaacaacaatatgcacaggttttggcccaacagcagaaagcagcactgtcttcccagcagcagcagcagttggcacttcttcttcaacagtttcagaccttgaagatgagaatatctgatcagaacatcattccctcagtaactaggtctgtgtccgtgccagatactggctctatctgggagcttcagccaacagcttcacagcctacagtttgggaaggtggtagtgtatgggatcttcctctggacaccacgacaccaggccctgccctggaacagcttcagcagctagagaaggccaaagctgcaaagctagagcaagagagaagagaggcagaaatgagggcaaaacgggaagaggaagagcgaaagaggcaggaagaactccgaagacaacaggaggaaattcttcggcgacagcaggaagaagaaaggaaaaggcgagaggaagaagaacttgcccgaaggaaacaggaagaggctctgcgtcgccagcgggagcaagaaattgcattaaggcgacagcgagaagaggaagaaagacagcagcaagaagaagctcttagaagactggaagagaggagaagagaagaggaagaaaggcggaagcaggaagaattgttacgcaaacaggaagaggaggctgcaaaatgggcccgggaagaagaagaagcccagcgtcgattagaggagaaccggctgcggatggaagaggaggcagccagactccggcatgaggaagaagaacggaagagaaaggagctggaggtccagcggcagaaggagttaatgcgccagaggcagcagcagcaagaggctctccggaggttgcagcagcagcagcagcaacaacagctggcgcagatgaagcttccttcttcttcaacgtggggccagcagtccaatacaacagcatgtcagtcccaggccacgctgtcgttggctgaaatccaaaaactagaggaagaacgagaacggcagcttcgagaagagcaaaggcgccagcagagggagttgatgaaagctcttcagcagcagcagcaacagcaacagcagaaactctcaggttgggggaatgtcagcaaaccttcaggtaccacgaaatctcttctggagatccagcaggaagaggccaggcaaatgcaaaagcagcagcagcagcagcagcaacaccagcaaccaaacagagctcgtaacaatacgcattccaacctgcacaccagcattgggaattctgtttggggctctataaatactggtcctcctaaccagtgggcatctgacctagtcagtagtatttggagtaatgctgacactaaaaactccaacatgggattctgggatgatgcagtgaaagaggtgggacctaggaattcaacaaataaaaataaaaacaacgccagtctcagtaaatctgtaggtgtgtctaaccggcagaataagaaagtagaagaagaagaaaagttgctgaagctctttcagggagtaaataaagcccaagatggatttacgcagtggtgtgaacagatgcttcatgcccttaatacggcaaataacttggatgttcccacatttgtttctttcctgaaagaagtagaatctccttatgaggtccatgattatatcagggcctatttaggagatacttctgaggccaaggagtttgccaagcagttccttgagcgccgtgccaaacagaaagccaaccagcagcgtcagcagcagcagctgccacagcagcagcagcagcagccgccacagcagccgccacagcagccacaacagcaggactctgtgtgggggatgaaccacagtacactccattcagtatttcagaccaatcaaagcaacaaccaacaatccaattttgaggctgtgcagagtggcaagaagaagaaaaagcagaagatggtccgagcagatcccagtttattaggattttcagtcaatgcatcatcggagcgactcaacatgggtgaaatcgagacgttggatgactactgagcacctgccagtggactggccatccctctcctgtctgccgactatggagtctccacctttggacacaacacttactcaccatttactctttatcactctgcaacaaatcacagaaccgatcatctcaggctttttcttctggccctttgtgtccaagattctttaatccatttttgttggtgaacatctcagactatagataagtggactggaccctgtgtcttgggggtggcagttgggattactccccaacaaggctgattttaggcagcatgtgttcactgtgctgtgatttcatctactgtctcccagaaagtgtgttgggatcggccattagcagcttgctttctcttgtcactttttttcttctattttgttttttcttcttctttttccccccatcagggcaaatggtctaactggtgcaatcatgaagagagttaatggttaacagacattggccaataacaaaacaccccatggactgtgactcgagtatccaacaggcagtcagagctctcccggtctgaaagttgcattgccactgctaactttgggattgcatcagagaggccctgagtggggttgagatgaggttggtttggtttgatgttacacactcctcacctgttctttctgagtgtcctttctctgaaaggatttatgtttttcttcgttagatagtgacttctgagcaagctgatctcccctggcatgctccaacctgattggacaaaggaagctctatggcctgggagagagactattcttaatttttctttcttacaaaaactgatttttcccataaatatttttacttcagaggactaggaccattttgttttgggcccttctgctgaaaatttgtctcgtttaagaggcagctagaatctttaccatatgtatgaatttgtataatttcatttttggatagggataaacttttgcttctgataaaagcctggaatttcatctggtcctcagagcattgcgtgtgtgtcttgctgtagcccggaaaaggttttgtgtaaagattctgggatggcaagttgtttgccttttctgaaaagagaacatacagaacctgtccatctttaagaccttcatccatggaatctactatacaggaggatgcagtgggctggaggggatgggcgaaaatgggagcaggaagcctggcctggcttctggtcatggcctcctaaaaccttaaacttcaagtagaaatgtactcaagccctatttataaacaaatacttttcctgcctccaccaaacccctacagaacatcacctggaattgccactcacactgggttggagtcattgggcagctgtgcctgtgcgagaggtgctgtggtctgggcagcccctggaaaagcacctttgctgcctgtcattgttgcctgaagaaggctggagttgctctgagagcagtttgggtttggagtattatatttggcttctatttttattattttggatcaccattctccctatcccttcttgcctccctcccttctaaacatgtgtaataactatacagagactgctacaaaattgtatatagtttttggatcaaatagcatgaggggagaggaaaccattaaaagttggggctcctactctcctttgctttgtaaattcaaaagttgggggtgggtaagagggatagttaaaatgtttacaaaactttaggctccctcggaacttttgccagtgtggaggaaaataaaaaagaacttaaat

SEQ ID NO: 266 - DNA, 5676 bp, Homo sapiens
ggatccttgagggcactggtgcgactttcaggtgaggtcttagcagatgaaagcggctggctgtggcccgcgccagtagtgctttctgctccgcactcgccgtgagccaggtgtgcaaccggatttggggcgagggtcgcgctggctacctcgcatgcgcagagccggaagcccgctgaccggactacagctcccagaagagccttgtggaggccgcagacgcgaagccgctggcgccatcttgaaatctgatcctccatccccgaggctttgcgtctgcgcggccggccgctgctgctccgggagcccagtctgctaaaaggggaggacgttgaggacgcggcggctggcgggagagacagctggggagagacatggcagggtcggagcgcggcctgcgcctctgtcactcagcatcctcttaggcgtttccacgcccgccccctgcccgaggggcggggctgacggctctggtacccggagtcggcgcgcggggcaggggcgcgcccctgcagagtggggaccccactgggctgtgccatgctgaccggagaccaccgaggcgggagacagagcgcggcgaagagccattgagtggtcacccagtagccgccgccgccgccgcctcgggaagcttgccacccgctaggagggaagatgaaggagatttgcaggatctgtgcccgagagctgtgtggaaaccagcggcgctggatcttccacacggcgtccaagctcaatctccaggttctgctttcgcacgtcttgggcaaggatgtcccccgcgatggcaaagccgagttcgcttgcagcaagtgtgctttcatgcttgatcgaatctatcgattcgacacagttattgcccggattgaagcgctttctattgagcgcttgcaaaagctgctactggagaaggatcgcctcaagttctgcattgccagtatgtatcggaagaataacgatgactctggcgcggagatcaaggcggggaatgggacggttgacatgtccgtcttacccgatgcgagatactctgcactgctccaggaggacttcgcctattcagggtttgagtgctgggtggagaatgaggatcagatccaggagccacacagctgccatggttcagaaggccctggaaaccgacccaggagatgccgtggttgtgccgctttgcgggttgctgattctgactatgaagccatttgtaaggtacctcgaaaggtggccagaagtatctcctgcggcccttctagcaggtggtcgaccagcatttgcactgaagaaccagcgttgtctgaggttgggccacccgacttagcaagcacaaaggtacccccagatggagaaagcatggaggaagagacgcctggttcctctgtggaatctttggatgcaagcgtccaggctagccctccacaacagaaagatgaggagactgagagaagtgcaaaggaacttggaaagtgtgactgttgttcagatgatcaggctccgcagcatgggtgtaatcacaagctggaattagctcttagcatgattaaaggtcttgattataagcccatccagagcccccgagggagcaggcttccgattccagtgaaatccagcctacctggagccaagcctggccctagcatgacagatggagttagttccggtttccttaacaggtctttgaaacccctttacaagacacctgtgagttatcccttggagctttcagacctgcaggagctgtgggatgatctctgtgaagattatttgccgctccgggtccagcccatgactgaagagttgctgaaacaacaaaagctgaattcacatgagaccactataactcagcagtctgtatctgattcccacttggcagaactccaggaaaaaatccagcaaacagaggccaccaacaagattcttcaagagaaacttaatgaaatgagctatgaactaaagtgtgctcaggagtcgtctcaaaagcaagatggtacaattcagaacctcaaggaaactctgaaaagcagggaacgtgagactgaggagttgtaccaggtaattgaaggtcaaaatgacacaatggcaaagcttcgagaaatgctgcaccaaagccagcttggacaacttcacagctcagagggtacttctccagctcagcaacaggtagctctgcttgatcttcagagtgctttattctgcagccaacttgaaatacagaagctccagagggtggtacgacagaaagagcgccaactggctgatgccaaacaatgtgtgcaatttgtagaggctgcagcacacgagagtgaacagcagaaagaggcttcttggaaacataaccaggaattgcgaaaagccttgcagcagctacaagaagaattgcagaataagagccaacagcttcgtgcctgggaggctgaaaaatacaatgagattcgaacccaggaacaaaacatccagcacctaaaccatagtctgagtcacaaggagcagttgcttcaggaatttcgggagctcctacagtatcgagataactcagacaaaacccttgaagcaaatgaaatgttgcttgagaaacttcgccagcgaatacatgataaagctgttgctctggagcgggctatagatgaaaaattctctgctctagaagagaaagaaaaagaactgcgccagcttcgtcttgctgtgagagagcgagatcatgacttagagagactgcgcgatgtcctctcctccaatgaagctactatgcaaagtatggagagtctcctgagggccaaaggcctggaagtggaacagttatctactacctgtcaaaacctccagtggctgaaagaagaaatggaaaccaaatttagccgttggcagaaggaacaagagagtatcattcagcagttacagacgtctcttcatgataggaacaaagaagtggaggatcttagtgcaacactgctctgcaaacttggaccagggcagagtgagatagcagaggagctgtgccagcgtctacagcgaaaggaaaggatgctgcaggaccttctaagtgatcgaaataaacaagtgctggaacatgaaatggagattcaaggcctgcttcagtctgtgagcaccagggagcaggaaagccaagctgctgcagagaagttggtgcaagccttaatggaaagaaattcagaattacaggccctgcgccaatatttaggagggagagactccctgatgtcccaagcacccatctctaaccaacaagctgaagttacccccactggccgtcttggaaaacagactgatcaaggttcaatgcagataccttccagagatgatagcacttcattgactgccaaagaggatgtcagcatacccagatccacattaggagacttggacacagttgcagggctggaaaaagaactgagtaatgccaaagaggaacttgaactcatggctaaaaaagaaagagaaagtcagatggaactttctgctctacagtccatgatggctgtgcaggaagaagagctgcaggtgcaggctgctgatatggagtctctgaccaggaacatacagattaaagaagatctcataaaggacctgcaaatgcaactggttgatcctgaagacataccagctatggaacgcctgacccaggaagtcttacttcttcgggaaaaagttgcttcagtagaatcccagggtcaagaaatttcaggaaaccgaagacaacagttgctgctgatgctagaaggactagtagatgaacggagtcggctcaatgaggccttacaagcagagagacagctctatagcagtctggtgaagttccatgcccatccagagagctctgagagagaccgaactctgcaggtggaactggaaggggctcaggtgttacgcagtcggctagaagaagttcttggaagaagcttggagcgcttaaacaggctggagaccctggccgccattggaggtgcagctgcaggggatgacaccgaagatacaagcactgagttcactgacagtattgaggaggaggctgcacaccatagtcaccagcaactatagcttcagaagcatttttacttgcaagacgatggacacattccccttgggctttttgtaactgaaacgcaccacagaagacagggagtcatcgaagggctgctcggggaggtggcagggcggaggacctgcttgggaagaaactccaagaagattggaatgcttccaaagcaagaatctttctcagtgaaatctcattatacaaagagaaccttatgcaacctgacaaaccactgaggtcatggtgactcagtgatcagcagatggtacttcaacagcaatcccctgtcaaacctcagaacttgaggctgaaacattgcttccacccaccatcagtgaagatgtaactagcatgttacaagagtgaataatctggacttcagagattaagtcaccaatagtgatctcacaagcactcaccggaactcctataatgtctccactttgtccatgccatttagcaatctcatctcctaaatggactgtgcctatgattcttaaggagaaagtgaatcattggtagatatcctgcacaagcagctggactttccagtaatagctttcttggggctattaggaaaattaaacaagaaatgaggctttctgggtctgcctgtatgtcttctgcataagacaaagaagagacatcgaatcaaccaataagaagagcccaaataagcatcctcaaatcttttgggatttggcacttggggacatgagtagttgtctgggatacgtcatattctcaacagtttctttgtagtagtaggatcaccttcttataataggatcaccttcttgttgctatagctgtacccgaccttcccttctcccttgagtgcttgcatgagctccacttttccttttgcttgaacagcttctcctgagtcctccttaccgatggttgtgactttaattatatacatctctgtccctccagacagatccctctgtcctcactctctgatttcattgaggatcttgggtgagagagagggacctgcaggatgaacaaatgtctactctaagacagctagattgggaggttggctggtcactgatggttataatgactgtgggacaggattaacttcagaataaatgaacaggagacacagatatgaagaaagtttctgattgatatggtctgaagtactcctggtattgcaagtcatttgctctaattctcaattgtaggcaaactgatttgtaaatttgcttcttcagccttctttcctgtagcctagcatggagaatctgaccagaccccattttgagaaggtcagcctacactggaatgaactttttacattagggcatttgtatttccctcacaatacttgccacattacttggcataggagagatgcttagtgtaattataagttaacaagcctttggatcagggcttgactcatgatagacaaagtatatgcctgctggatggaagaatctcttgggcgagcaccatttttctttccatcacctttccttgaaaatatatcttcagctttgggtaggaggaatcttggtgtatgaaatcattgcaaatttacttcatcttttctggagtttgaagttgtgactctcctgctaccaattaaataaagcttactttgccat

SEQ ID NO: 267 - DNA, 2483 bp, Homo sapiens
tggagtttgactattctgaggacaagagtagttgggacaaccagcaggaaaacccccctcctaccaaaaagataggcaaaaagccagttgccaaaatgcccctgaggaggccaaagatgaaaaagacacccgagaaacttgacaacactcctgcctcacctcccagatcccctgctgaacccaatgacatccccattgctaaaggtacttacacctttgatattgacaagtgggatgaccccaattttaaccctttttcttccacctcaaaaatgcaggagtctcccaaactgccccaacaatcatacaactttgacccagacacctgtgatgagtccgttgacccctttaagacatcctctaagacccccagctcaccttctaaatccccagcctcctttgagatcccagccagtgctatggaagccaatggagtggacggggatgggctaaacaagcccgccaagaagaagaagacgcccctaaagactgacacatttagggtgaaaaagtcgccaaaacggtctcctctctctgatccaccttcccaggaccccaccccagctgctacaccagaaacaccaccagtgatctctgcggtggtccacgccacagatgaggaaaagctggcggtcaccaaccagaagtggacgtgcatgacagtggacctagaggctgacaaacaggactacccgcagccctcggacctgtccacctttgtaaacgagaccaaattcagttcacccactgaggagttggattacagaaactcctatgaaattgaatatatggagaaaattggctcctccttacctcaggacgacgatgccccgaagaagcaggccttgtaccttatgtttgacacttctcaggagagccctgtcaagtcatctcccgtccgcatgtcagagtccccgacgccgtgttcagggtcaagttttgaagagactgaagcccttgtgaacactgctgcgaaaaaccagcatcctgtcccacgaggactggcccctaaccaagagtcacacttgcaggtgccagagaaatcctcccagaaggagctggaggccatgggtttgggcaccccttcagaagcgattgaaattacagctcccgagggctcctttgcctctgctgacgccctcctcagcaggctagctcaccccgtctctctctgtggtgcacttgactatctggagcccgacttagcagaaaagaaccccccactattcgctcagaaactccagagagaggctgttcacccaacagacgtctccatctccaaaacagccttgtactcccgcatcgggaccgctgaggtggagaaacctgcaggccttctgttccagcagcccgacctggactctgccctccagatcgccagagcagagatcataaccaaggagagagaggtctcagaatggaaagataaatatgaagaaagcaggcgggaagtgatggaaatgaggaaaatagtggccgagtatgagaagaccatcgctcagatgatagaggacgaacagagagagaagtcagtctcccaccagacggtgcagcagctggttctggagaaggagcaagccctggccgacctgaactccgtggagaagtctctggccgacctcttcagaagatatgagaagatgaaggaggtcctagaaggcttccgcaagaatgaagaggtgttgaagagatgtgcgcaggagtacctgtcccgggtgaagaaggaggagcagaggtaccaggccctgaaggtgcacgcggaggagaaactggacagggccaatgctgagattgctcaggttcgaggcaaggcccagcaggagcaagccgcccaccaggccagcctgcggaaggagcagctgcgagtggacgccctggaaaggacgctggagcagaagaataaagaaatagaagaactcaccaagatttgtgacgaactgattgccaaaatggggaaaagctaactctgaaccgaatgttttggacttaactgttgcggcaatatgaccgtcggcacactgctgttcctccagttccatggacaggttctgttttcactttttcgtatgcactactgtatttcctttctaaataaaattgatttgattgtatgcagtactaaggagactatcagaatttcttgctattggtttgcattttcctagtataattcatagcaagttgacctcagagttcctgtatcagggagattgtctgattctctaataaaagacacattgctgaccttggccttgccctttgtacacaagttcccagggtgagcagcttttggatttaatatgaacatgtacagcgtgcatagggactcttgccttaaggagtgtaaacttgatctgcatttgctgatttgtttttaaaaaaacaagaaatgcatgtttcaaataaaattctctattgtaaataaaattttttctttggatcttgaaaaaaaaaaaaaaaaaaaaaaaaaaaaaaaaaaaaaa

SEQ ID NO: 268 - DNA, 4143 bp, Homo sapiens
ggctgatgacgactggtggccaatgcagatactaattaagtgccctaatcaaattgtgagacagatgtttcagcgtttgtgtatccatgtgattcagaggctgagacctgtgcatgctcatctctatttgcagccaggaatggaagatgggtcagatgatatggatacctcagtagaagatattggtggtcgttcatgtgtcactcgctttgtgagaaccctgttattaattatggaacatggtgtaaaacctcacagtaaacatcttacagagtattttgccttcctttacgaatttgcaaaaatgggtgaagaagagagccaatttttgctttcattgcaagctatatctacaatggtacatttttacatgggaacaaaaggacctgaaaatcctcaagttgaagtgttatcagaggaagaaggggaagaagaagaggaggaagaagatatcctctctctggcagaagaaaaatacaggccagctgcccttgaaaagatgatagctttagttgctcttttggttgaacagtctcgatcagaaaggcatttgacattatcacagactgacatggcagcattaacaggaggaaagggatttcccttcttgtttcaacatattcgtgatggcatcaatataagacaaacttgtaatctgattttcagcctgtgtcgatacaataatcgacttgcagaacatattgtatctatgcttttcacatcaatagcaaagttgactcctgaggcagccaatcctttctttaagttgttgactatgctaatggagtttgctggtggacctccaggaatgcctccctttgcatcttatattctgcagaggatatgggaggtgattgaatacaatccttctcagtgtctagattggttggcagtgcagacaccccgaaataaactggcacacagctgggtcttacagaatatggaaaactgggtcgagcggtttcttttggctcacaattatcctagagtgaggacttctgcagcttatcttctggtgtcccttataccaagcaattcattccgtcagatgttccggtcaacaaggtctttgcacatcccaacccgtgaccttccactcagtccagacacaacagtagtcctacatcaggtctacaacgtgctccttggtttgctctcaagagccaaactttatgttgatgctgctgttcatggcactacaaagctagtgccctattttagctttatgacttactgtttaatttccaaaactgagaagctgatgttttccacatatttcatggatttgtggaaccttttccagcctaaactttctgagccagcaatagctacaaatcacaataaacaggctttgctttcattttggtacaatgtctgtgctgactgtccagagaatatccgccttattgttcagaacccagtggtaaccaagaacattgccttcaattacatccttgctgaccatgatgatcaggatgtggtgctttttaaccgtgggatgctgccagcgtactatggcattctgaggctctgctgtgagcagtctcctgcattcacacgacaactggcttctcaccagaacatccagtgggcctttaagaatcttacaccacatgccagccaataccctggagcagtagaagaactgtttaacctgatgcagctgtttatagctcagaggccagatatgagagaagaagaattagaagatattaaacagttcaagaaaacaaccataagttgttacttacgttgcttagatggccgctcctgctggactactttaataagtgccttcagaatactattagaatctgatgaagacagacttcttgttgtatttaatcgaggattgattctaatgacagagtctttcaacactttgcacatgatgtatcacgaagctacagcttgccatgtgactggagatttagtagaacttctgtcaatatttctttcggttttgaagtctacacgcccttatcttcagagaaaagatgtgaaacaagcattaatccagtggcaggagcgaattgaatttgcccataaactgttaactcttcttaattcctatagtcctccagaacttagaaatgcctgtatagatgtcctcaaggaacttgtacttttgagtccccatgattttcttcatactctggttccctttctacaacacaaccattgtacttaccatcacagtaatataccaatgtctcttggaccttatttcccttgtcgagaaaatatcaagctaataggagggaaaagcaatattcggcctccgcgccctgaactcaatatgtgcctcttgcccacaatggtggaaaccagtaagggcaaagatgacgtttatgatcgtatgctgctagactacttcttttcttatcatcagttcatccatctattatgccgagttgcaatcaactgtgaaaaatttactgaaacattagttaagctgagtgtcctagttgcctatgaaggtttgccacttcatcttgcactgttccccaaactttggactgagctatgccagactcagtctgctatgtcaaaaaactgcatcaagcttttgtgtgaagatcctgttttcgcagaatatattaaatgtatcctaatggatgaaagaacttttttaaacaacaacattgtctacacgttcatgacacatttccttctaaaggttcaaagtcaagtgttttctgaagcaaactgtgccaatttgatcagcactcttattacaaacttgataagccagtatcagaacctacagtctgatttctccaaccgagttgaaatttccaaagcaagtgcttctttaaatggggacctgagggcactcgctttgctcctgtcagtacacactcccaaacagttaaacccagctctaattccaactctgcaagagcttttaagcaaatgcaggacttgtctgcaacagagaaactcactccaagagcaagaagccaaagaaagaaaaactaaagatgatgaaggagcaactcccattaaaaggcggcgtgttagcagtgatgaggagcacactgtagacagctgcatcagtgacatgaaaacagaaaccagggaggtcctgaccccaacgagcacttctgacaatgagaccagagactcctcaattattgatccaggaactgagcaagatcttccttcccctgaaaatagttctgttaaagaataccgaatggaagttccatcttcgttttcagaagacatgtcaaatatcaggtcacagcatgcagaagaacagtccaacaatggtagatatgacgattgtaaagaatttaaagacctccactgttccaaggattctaccctagctgaggaagaatctgagttcccttctacttctatctctgcagttctgtctgacttagctgacttgagaagctgtgatggccaagctttgccctcccaggaccctgaggttgctttatctctcagttgtggccattccagaggactctttagtcatatgcagcaacatgacattttagataccctgtgtaggaccattgaatctacaatccatgtcgtcacaaggatatctggcaaaggaaaccaagctgcttcttgacattaggtgtagcatgtctacttttaagtccctcacccccaacccccatgctgtttgtataagttttgcttatttgtttttgtgcttcagtttgtccagtgctctctgcttgaatggcaagatagatttataggcttaattcttggtcaggcagaactccagatgaaaaaaacttgcatcttcagtatacttcctaaagggcaatcagataatggatatgttttatgtaattaagagttcactttagtggctttcatttaatatggctgtctgggaagaacagggttgcctagccctgtacaatgtaatttaaacttacagcatttttactgtgtatgatatggtgtcctctgtgccagttttgtaccttatagaggcagattgcctccgatcgctgtggttcttattatcaaaattaagtttacttgtatacggaacaaccacaagaaatttgattctgtaaagaatcctctttagctgtggcctggcagtatataaatggtgctttatttaacagaatacctgtggaggaaataaagcacacttgatgt

SEQ ID NO: 269 - DNA, 1605 bp, Homo sapiens
aatgccgagaggatggagagcatcctgcaggcactggaggatattcagctggatctggaggcagtgaacatcaaggcaggcaaagccttcctgcgtctcaagcgcaagttcatccagatgcgaagacccttcctggagcgcagagacctcatcatccagcatatcccaggcttctgggtcaaagcattcctcaaccaccccagaatttcaattttgatcaaccgacgtgatgaagacattttccgctacttgaccaatctgcaggtacaggatctcagacatatctccatgggctacaaaatgaagctgtacttccagactaacccctacttcacaaacatggtgattgtcaaggagttccagcgcaaccgctcaggccggctggtgtctcactcaaccccaatccgctggcaccggggccaggaaccccaggcccgtcgtcacgggaaccaggatgcgagccacagctttttcagctggttctcaaaccatagcctcccagaggctgacaggattgctgagattatcaagaatgatctgtgggttaaccctctacgctactacctgagagaaaggggctccaggataaagagaaagaagcaagaaatgaagaaacgtaaaaccaggggcagatgtgaggtggtgatcatggaagacgcccctgactattatgcagtggaagacattttcagcgagatctcagacattgatgagacaattcatgacatcaagatctctgacttcatggagaccaccgactacttcgagaccactgacaatgagataactgacatcaatgagaacatctgcgacagcgagaatcctgaccacaatgaggtccccaacaacgagaccactgataacaacgagagtgctgatgaccacgaaaccactgacaacaatgagagtgcagatgacaacaacgagaatcctgaagacaataacaagaacactgatgacaacgaagagaaccctaacaacaacgagaacacttacggcaacaacttcttcaaaggtggcttctggggcagccatggcaacaaccaggacagcagcgacagtgacaatgaagcagatgaggccagtgatgatgaagataatgatggcaacgaaggtgacaatgagggcagtgatgatgatggcaatgaaggtgacaatgaaggcagcgatgatgacgacagagacattgagtactatgagaaaggtattgaagactttgacagggatcaggctgactacgaggacgtgatagagatcatctcagacgaatcagtggaagaagagggcattgaggaaggcatccagcaagatgaggacatctatgaggaaggaaactatgaggaggaaggaagtgaagatgtctgggaagaaggggaagattcggacgactctgacctagaggatgtgcttcaggtcccaaacggttgggccaatccggggaagagggggaaaaccggataagggttttccccttttggggatcacctctctgtatcccccacccactatcccatttgccctcctcctcagctagggccacgcggacccacattgcacttctggggggtgaccgacttcgtacacgggtttaaagtttattttttt

SEQ ID NO: 270 - DNA, 2488 bp, Homo sapiens
ggccggaacaggcgtttagagaaaatggcagacgatattgatattgaagcaatgcttgaggctccttacaagaaggatgagaacaagttgagcagtgccaacggccatgaagaacgtagcaaaaagaggaaaaaaagcaagagcagaagtcgtagtcatgaacgaaagagaagcaaaagtaaggaacggaagcgaagtagagacagagaaaggaaaaagagcaaaagccgtgaaagaaagcgaagtagaagcaaagagaggcgacggagccgctcaagaagtcgagatcgaagatttagaggccgctacagaagtccttactccggaccaaaatttaacagtgccatccgaggaaagattgggttgcctcatagcatcaaattaagcagacgacgttcccgaagcaaaagtccattcagaaaagacaagagccctgtgagagaacctattgataatttaactcctgaggaaagagatgcaaggacagtcttctgtatgcagctggcggcaagaattcgaccaagggatttggaagagtttttctctacagtaggaaaggttcgagatgtgaggatgatttctgacagaaattcaagacgttccaaaggaattgcttatgtggagttcgtcgatgttagctcagtgcctctagcaataggattaactggccaacgagttttaggcgtgccaatcatagtacaggcatcacaggcagaaaaaaacagagctgcagcaatggcaaacaatttacaaaagggaagtgctggacctatgaggctttatgtgggctcattacacttcaacataactgaagatatgcttcgtgggatctttgagccttttggaagaattgaaagtatccagctgatgatggacagtgaaactggtcgatccaagggatatggatttattacattttctgactcagaatgtgccaaaaaggctttggaacaacttaatggatttgaactagcaggaagaccaatgaaagttggtcatgttactgaacgtactgatgcttcgagtgctagttcatttttggacagtgatgaactggaaaggactggaattgatttgggaacaactggtcgtcttcagttaatggcaagacttgcagagggtacaggtttgcagattccgccagcagcacagcaagctctacagatgagtggctctttggcatttggtgctgtggcagaattctcttttgttatagatttgcaaacaagactttcccagcagactgaagcttcagctttagctgcagctgcctctgttcagccacttgcaacacaatgtttccaactctctaacatgtttaaccctcaaacagaagaagaagttggatgggataccgagattaaggatgatgtgattgaagaatgtaataaacatggaggagttattcatatttatgttgacaaaaattcagctcagggcaatgtgtatgtgaagtgcccatcaattgctgcagctattgctgctgtcaatgcattgcatggcaggtggtttgctggtaaaatgataacagcagcatatgtacctcttccaacttaccacaacctgtttcctgattctatgacagcaacacagctactggttccaagtagacgatgaaggaagatatagtcccttatgtatatagctttttttctttcttgagaattcatcttgagttatcttttatttagataaaaataaagaggcaaggatctactgtcatttgtatgcaatttcctgttaccttgaaaaaataaaaatgttaacaggaatgcagtgtgctcattctccctaaatagtaaatcccactgtatacaaaactgttctcttgttctgccttttaaaatgttcatgtagaaaattaatgaactataggaatagctctaggagaacaaatgtgctttctgtaaaaaggcagaccagggatgtaatgtttttaatgtttcagaagcctaactttttacacagtggttacatttcacatttcactaatgttgatatttggctgatggttgagcagtttctgaaatacacatttagtgtatggaaatacaagacagctaaagggctgtttggttagcatctcatcttgcattctgatcaattggcaagaaagggagatttcaaaattatatttcttgatggtatcttttcaattaatgtatctgtaaaagtttctttgtaaatactatgtgttctggtgtgtcttaaaattccaaacaaaatgatccctgcatttcctgaagatgtttaaacgtgagagtctggtaggcaaagcagtctgagaaagaaataggaaatgcagaaataggttttgtctggttgcatataatctttgctctttttaagctctgtgagctctgaaatatatttttgggttacttcagtgtgtttgacaagacagcttgatatttctatcaaacaaatgactttcatattgcaacaatctttgtaagaaccactcaaataaaagtctcttaaaaaggcc

SEQ ID NO: 271 - DNA, 1769 bp, Homo sapiens
gctttcacccattagcattacttacgtagataattctttatgcctagttattatacatattaatttttaaggtatacatttaaattacacaattgttcattgtggtttgtatcccagaatgtgttgtgttttttaaaagatgcataatagctgaatgtatgcatgactttgaaagaagttaaaatggtgattttttttcacctcttgtacattttaaaaccaggccaaatctatttgccaagcagtgtatcactaataagaaaagcagtttttccttttattgcagtttttgtttatctgccatagaatttccttatactgtggcttggtattattcaagattagctatttcgctggtattacatctttttaaaagcctattataacatggttagcctataaggcagtgttggtccccttctaatattggcctcataaaggggttccactgtactttccgcatattactgtgttgttgttttcctttgtggatatataagcaaattgagcttgggtgatttttatggagacaataattagacaatactgtataattagttttacttaatagattatcatcttgtgagaagagatgtttaaacgtggtaaatcacttcatattacaaaacagttttacacttaatatgttaacattgggtgcaataatttagtagcattagctttagttacaaatataactggatctttctgctgacaacttaggttgtatgagttatgcttaaaagctttaaatctgatgtttcctgtacctgccacactatgttagaatgtgtccttcaaacatatcctcctgcaacttctcaaactgtactaaattgatatttcttgaagtctaactctgtgctaacagatctccattttaaatagaatacggttttaatttttgataagctgctgaattttaaagagagttttttggggccaccaaatattttggatcatgcagagaatatatattgtactgtagtaattttgtatttacatttgtatgatgtgacataatagatgtgaatgttaatcactgcttgactatgttaataaagttgtttaactataaaaaaaaaaaaaaacccacgcgtccttcagatcaatccatctatgcaaatttatggggaaaaattgttttttaaattaaatttccaatacccaagccctaaaattgatggatgtgaccccaggtgttccccttacctcttggccccccaaaacagggacagacatagatggtgggctggaacacccctcacctcctgtattcccagaaagcctcgcgttgaggtgtgttggccagctccctagtttgtgcttactatacctggccacgcctccctacctaaggccgctggcttaaccctaggggcaggcagtgttagatcagacccagaccttctcatcccaccctcatcacatcggggagaggggactccaggggcgggaaggcaggcgtccctccatttggccagggtgggcggcgaggagggggtcactctgcaggaacactgagctctgaacacctctcgcctgctgcctgcctcacaccctctgcattcgctgtttcctctgttgggggagggggtttgtgaggggaatattagattacaccttgtcatttggaaagccccgtgtctccggcggccacagcgaggttgggggggtggtgagggaagtccatggattggccagaactgggggaaaaacaaaaagaaatgagagaaagagagagcgggtaccaaaaaaaaaaaaaaaaa

SEQ ID NO: 272 - DNA, 5541 bp, Homo sapiens
gtccagagtggcagtaaaggaggaagatggcggggtgcagggggtctctgtgctgctgctgcaggtggtgctgctgctgcggtgagcgtgagacccgcacccccgaggagctgaccatccttggagaaacacaggaggaggaggatgagattcttccaaggaaagactatgagagtttggattatgatcgctgtatcaatgacccttacctggaagttttggagaccatggataataagaaaggtcgaagatatgaggcggtgaagtggatggtggtgtttgccattggagtctgcactggcctggtgggtctctttgtggacttttttgtgcgactcttcacccaactcaagttcggagtggtacagacatcggtggaggagtgcagccagaaaggctgcctcgctctgtctctccttgaactcctgggttttaacctcacctttgtcttcctggcaagcctccttgttctcattgagccggtggcagcaggttccgggatacccgaggtcaaatgctatctgaatggcgtaaaggtgccaggaatcgtccgtctccggaccctgctctgcaaggtccttggagtgctgttcagtgtggctggagggctcttcgtggggaaggaaggccccatgatccacagtggttcggtggtgggagctggcctccctcagtttcagagcatctccttacggaagatccagtttaacttcccctatttccgaagcgacagagacaagagagactttgtatcagcaggagcggctgctggagttgctgcagctttcggggcgccaatcgggggtaccttgttcagtctagaggagggttcgtccttctggaaccaagggctcacgtggaaagtgctcttttgttccatgtctgccaccttcaccctcaacttcttccgttctgggattcagtttggaagctggggttccttccagctccctggattgctgaactttggcgagtttaagtgctctgactctgataaaaaatgtcatctctggacagctatggatttgggtttcttcgtcgtgatgggggtcattgggggcctcctgggagccacattcaactgtctgaacaagaggcttgcaaagtaccgtatgcgaaacgtgcacccgaaacctaagctcgtcagagtcttagagagcctccttgtgtctctggtaaccaccgtggtggtgtttgtggcctcgatggtgttaggagaatgccgacagatgtcctcttcgagtcaaatcggtaatgactcattccagctccaggtcacagaagatgtgaattcaagtatcaagacatttttttgtcccaatgatacctacaatgacatggccacactcttcttcaacccgcaggagtctgccatcctccagctcttccaccaggatggtactttcagccccgtcactctggccttgttcttcgttctctatttcttgcttgcatgttggacttacggcatttctgttccaagtggcctttttgtgccttctctgctgtgtggagctgcttttggacgtttagttgccaatgtcctaaaaagctacattggattgggccacatctattcggggacctttgccctgattggtgcagcggctttcttgggcggggtggtccgcatgaccatcagcctcacggtcatcctgatcgagtccaccaatgagatcacctacgggctccccatcatggtcacactgatggtggccaaatggacaggggactttttcaataagggcatttatgatatccacgtgggcctgcgaggcgtgccgcttctggaatgggagacagaggtggaaatggacaagctgagagccagcgacatcatggagcccaacctgacctacgtctacccgcacacccgcatccagtctctggtgagcatcctgcgcaccacggtccaccatgccttcccggtggtcacagagaaccgcggtaacgagaaggagttcatgaagggcaaccagctcatcagcaacaacatcaagttcaagaaatccagcatcctcacccgggctggcgagcagcgcaaacggagccagtccatgaagtcctacccatccagcgagctacggaacatgtgtgatgagcacatcgcctctgaggagccagccgagaaggaggacctcctgcagcagatgctggaaaggagatacactccctaccccaacctataccctgaccagtccccaagtgaagactggaccatggaggagcggttccgccctctgaccttccacggcctgatccttcggtcgcagcttgtcaccctgcttgtccgaggagtttgttactctgaaagccagtcgagcgccagccagccgcgcctctcctatgccgagatggccgaggactacccgcggtaccccgacatccacgacctggacctgacgctgctcaacccgcgcatgatcgtggatgtcaccccatacatgaacccttcgcctttcaccgtctcgcccaacacccacgtctcccaagtcttcaacctgttcagaacgatgggcctgcgccacctgcccgtggtgaacgctgtgggagagatcgtggggatcatcacacggcacaacctcacctatgaatttctgcaggcccggctgaggcagcactaccagaccatctgacagcccagcccaccctctcctggtgctgcctggggaggcaaatcatgctcactccggcgggcacagctggctggggctgttccggggcatggaagattcccagttacccactcactcagaaagccgggagtcatcggacaccttgctggtcagaggccctgggggtggttttgaaccatcagagcttggacttttctgacttccccagcaaggatcttcccacttcctgctccctgtgttcccaccctccagtgttggcacaggcccacccctggctccaccagagccagaagcagaggtagaatcaggcgggccccgggctgcactccgagcagtgttcctggccatctttgctactttcctagagaacccggctgttgccttaaatgtgtgagagggacttggccaaggcaaaagctggggagatgccagtgacaacatacagttcatgactaggtttaggaattgggcactgagaaaattctcaatatttcagagagtccttcccttatttgggactcctaacacggtatcctcgctagtttgttttaagggaaacactctgctcctgggtgtgagcagaggctctggtcttgccctgtggtttgactctccttagaaccaccgcccaccagaaacataaaggattaaaatcacactaataacccctggatggtcaatctgataataggatcagatttacgtctaccctaattcttaacattgcagctttctctccatctgcagattattcccagtctcccagtaacacgtttctacccagatcctttttcatttccttaagttttgatctccgtcttcctgatgaagcaggcagagctcagaggatcttggcatcacccaccaaagttagctgaaagcagggcactcctggataaagcagcttcactcaactctggggaatgctaccattttttttccaaagtagaaaggaagcacttctgagccagtgaccactgaaaggtatgtgctatgataaagcagatggcctatttgaggaagagggtgtctgcccttcacaaacacctctctctcccctgcactagctgtcccaagcttacatacagaggcccttcaggagggcctcctgtgccgcagggagggtgcgtggggaagatgcttcctgccagcacgtgcctgaaggtttcacatgaagcatgggaagcgcaccctgtcgttcagtgacgtcattcttctccaggctggcccgccccctctgactaggcacccaaagtgagcatctgggcattgggcattcatgcttatcttcccccaccttctacatggtatcagtcccagcaggcatccctggggcagacgtgctttggctcaagatggccttcatttacgtttagttttttttaaaaccgtggaggttgcccacgggcctcggcacctggccctggcagcacagctctcaggcccagccctgggcgacctccttggccaagtctgcctttcaccctggggtgagcatcagtcctggctctgctggtccagatcttgcgctcagcacactctagggaataattccactccagagatggggctgcttcaaggtcttttctagctgattgtggcccctccattttccccattttcttatctccctgaccaaaattgctttgacttctaaatgtttctgcttcccagaatgcacctgacttatgaaatggggataatactcccaggaaatagcgcaggacatcacaaggaccaaaaaggcaattcttatttaaatgttactatttggccagctgctgctgtgttttatggcagtgttcagagcttgatcacgttatttcttccttttattaagaaggaagccaattgtccaagtcaggagaatggtgtgatcacctgtcacagacactttgtcccctctccccgccccttcctggagctggcagagctaacgccctgcaggaggaccccggcctctcgagggctggatcagcagccgcctgccctgaggctgccccggtgaatgttattggaattcatccctcgtgcacatcctgttgtgtttaagtcaccagatattttgttcccatcagtttagcccagagatagacagtagaatgcaaatacctccctcccctaaactgactggacggctgccaaggaggccccaaacccaggccccatgcaaaggcacgtggtttccttttctcctctctctgcatctgcgctttccagataagcccaaagacagcaacttctccactcatgacaaatcaactgtgaccctcgctccttccatttctgtccattagaaaccagccttttcagcatctcacccattagcagccccatcacccagtgatcagtcgcctcagtaaagcagatctgtggatggggagcctacgggtggtaagaagtggtgttttgtgtttcatctccagcttggtgttccatggcccctaggcgaggtgatcagggagtggggccaatgggcccccggccctggctttgggaccttgtgctgagggatgatttgctcctgaccttgattaacttaacagttcccagctggaagggacactttcaggacccagtccactgtatggcatttgtgatgcagaattatgcactgacatgaccctgggtgacaggaaagcctttcgagaggcccaaggtggcctcgccagccctgcagtattgatgtgcagtattgcaccacagctctgcggaccttggccattgccgcagtcgcagcttccttttttctgtttgcactgtttgtttgtatgatgttagctaattccactgtgtatataaattgtattttttttaatttgtaaaatgctatttttatttgaacctttggaacttgggagttctcattgtaaccctaacatgtgagaataaaatgtcttctgtc

SEQ ID NO: 273 - DNA, 5047 bp, Homo sapiens
ccgttgctgtcgccgttgctgtcgggggcgctgtgcgctgaggaaggcgcgggcgagccggagcagaagaaggagggagggagccagccgctgcagccaccaccgccaccatgtcctaccaaggcaagaagaacatcccgcggatcacgagtgaccgtctccttatcaagggaggcagaatcgtcaatgatgatcagtccttttatgctgatatttacatggaagatggcttaataaaacaaattggagacaatctgattgttcctggaggagtgaagaccattgaagccaatgggaagatggtgatccctggaggcatcgatgtccatactcacttccagatgccatataagggaatgaccacagtagatgacttcttccaagggacaaaggcggccttagcaggtggcaccaccatgatcattgaccatgtggtgcctgagcctgagtccagcctgactgaggcctatgagaaatggagagagtgggctgatgggaagagttgctgtgactatgccctgcatgtggacatcacccactggaatgacagcgtcaagcaggaagtgcagaacctcatcaaggacaaaggggttaactccttcatggtttatatggcttataaggatttgtatcaagtatctaacacagagctctatgagatcttcacctgcctgggagagctgggggccattgctcaagttcatgctgagaatggggatatcattgcccaggagcaaacccgcatgttggaaatggggataactggcccagaaggccatgtactgagcaggccagaagagctggaagctgaggctgtgttccgtgccatcaccattgccagccaaaccaattgccctctctacgtcacaaaggtcatgagcaagagtgcagctgacctcatctcacaagccaggaaaaaaggaaatgtagtctttggtgagcccatcactgccagcctcggcatagatggaacccattattggagcaagaactgggccaaggcggctgcatttgtgacatccccacccctgagccctgacccaactactccggactacatcaactccttgctggccagcggggatctgcagctatctgggagtgcccactgcaccttcagcactgcccagaaagcaattgggaaggacaacttcacagccattcctgagggcaccaatggtgtggaggagcggatgtctgtcatctgggacaaggctgtggccacagggaaaatggacgaaaaccagttcgtggctgtgacaagcacaaacgctgccaagatcttcaacctgtatccccgcaagggaagaatatctgtgggttctgacagcgacctcgtcatctgggatccagatgctgtgaagatcgtctctgccaagaaccaccagtctgcggcagagtacaacatctttgaagggatggagctgcgcggggctcctctggttgtcatctgccagggcaagatcatgctggaagatggcaacctgcacgtgacccagggggctggccgcttcataccctgcagcccgttctccgactatgtctacaagcgcattaaagcacggaggaagatggcagacctgcatgccgtcccaaggggcatgtacgatgggcctgtgtttgacctgaccaccacccccaaaggtggcacccccgcaggctctgctcggggctctcctactcggccgaacccacctgtgaggaatcttcatcagtcgggatttagcctgtcaggcacccaagtggatgagggggttcgctcagccagcaagcgcatcgtggcccccccaggcggccgttctaatatcacatctctgagttaagcaagccttcctcaaagagaggggcagaagcaagaagagattgttttgaagccaaaatggtacaccgatatttaagaaggaaagcgaatccaaacggttgtgatctaaagaatcaataagcctcaagccttatgtttctccaatgttacgctcgcttgcctagctttacgaatattgctttgttttctgtttatgcatagccttgatttgtttgactcccctccccccatttacatgcatgcaatcagacaggccactaaggtaaaagagtctgctctatcatagtgttgagagcgtgtgtagtgctgcatcttatgacaaggggacagacaagctgggacgtcagggaaatgaacaaaagggacgcaggttatttggggtgagtgggtggtgggagcctggagcaaggtggagggtgcagaggggctggggtagggcatgtaggagggaggtgggtgggtcaggtgagtggaaggggtgttgtatattgtgttgatgacgtacgttatttccatggaagatagccgctgtggcagctgtcacatcaccacagctccctagggtctgccgagaaggcaggcagtctttgggttctgttctttgtcacgtcccctacaagtaaattttgtttctttgaacgtttattaaaatgccaagacccaaccatttcttccacctgcttgattgtgccagtgtttgctcaggcctctttcttagtgttgctttcaaatccttctctttcctgggttgggaaggccaggcagggacagagcaaatgacacttctcttcctcttgccctccctgcctctttggtgctcttaaaagccagcagctgagaacatagcacaggcccacgtggtgagggcacccacagcttaaagacgcttccttctaaacacggcgaggtcacctctcactcttctgtctttgcaaaccgagaagagtggcatgcttctggcatcccaagtcaggattttagctcagatgaggcagaatgaagggcctctcttacaggcagtttgtgtttgattctctcgatcctggcacatccatgataaataggagtttttgaaagttggttttattaggtgttccctaatttttaccgtaataggtcatctcagcttatatgaaagtcaagtggggaactgggaaagccaaagtcagtcttgagcagagggagcacattttgtggacctggttccacctttccattccaaaccacctgtttccccttccattagcagaaactctgggggaactttgtgtctcagtcctagaatctccccaagtgagtggaagtgacatgatgcagtcttcctcatggggcacctgaaagaaattagtgtgggtgcttcgatctaccttgtctgtcagagttgaatatctctttccctatcatgctgcttctgaaaattcagttttggagcaagtcctgtgagcaagataagaatctatagaaccaagatgctcattttcagaagaaatatgttcaacctgggatcagacttccatgctctggggaatccaagtggtagcacctgtaaccctgtgtactaagtgctttgaagagaagagcaggcctcagacaccttttaattgcttaggagaaaccattgtctctgactgcaggtttgaataagttgaagaccagagaaaagtacacactgggctacaaaggaatttggagatagccaaggaacaggatttcccctagcaagctaccttctgttcaaatcatgaaaaaagactatttccccttagaatagggaagcttgctattttaaagctcttgtagtgcttttcttttaagggagatgtagtaaaagggaaaatgtagctcttagtttacacttcaaagatgtgggggtctttcagagaactaagaataacagttttatgtgcagagagagtttgccagatctgaagcatatacctcattgactaggctgttactttgggataggttgcagtaccagccacagccagcagatagaggaaaagacacacataaactcgcttctgagcgtccacttctgcactctctgctctgctgttactcagcccctgagtctgactcatctctgcacaacctctctgtgccatgaagataagtcttccatggccaaatcggtcatccgcactgcccttgggacttccgaagtgaaccattccaccagaacctttgattctgcacaagatttccttgctctgggaacaacccccaaatgcccttgggaggaacaacatgagctcaggaagcctctctttcttcacttaccattactaactctccaagcatagaaatccctgggaattgcgagaataactcccactattttaaaatttatattcagatttgtttcgtttcataagacacatcaaacaggcctatacaaaaggtttaggaaaagaaaacaatggtgagtcccggccctcttcgaattcactggcacctcatgcaagtgtaggaaggcacgctggatcgtctatctgattccaaagctgtcctttgccatctcatcccttggcctgccccccaaccctgaggatgcccctgccatccccccaacctcctcatattgcctctgaacccagatggcaatccatcccggttctctctgagggccacgggcttgggtagtggaaagggtgtttgggaaattgttaaatcagttacccgtagtagagctatttcttgtacttctaagttttctagaagtggaaggattgtagtcatcctgaaaatgggtttacttcaaaatccctcagccttgttcttcacgactgtctatactgagagtgtcatgtttccacaaagggctgacacctgagcctggattttcactcatccctgagaagccctttccagtagggtgggcaattcccaacttccttgccacaagcttcccaggctttctcccctggaaaactccagcttgagtcccagatacactcatgggctgccctgggcagccagcattcattgtaagttccctctttgaaaactggtgtgtgggtgttcagttctgtgtctggtgggtatggacagacagtaatctcctgtgatctgtgctagctgtgaggcagctctggaacgtgaagagctgtttggtttgaaccgtgaacaaaactgtgttttgagtttagctgacattaaagaaaaaagttcatcacgtgactgttaatgtaaacctggttattaaaataactatgaaattac

SEQ ID NO: 274 - DNA, 1231 bp, Homo sapiens
gacaagatggccacaccggcggtaccagtaagtgctcctccggccacgccaaccccagtcccggcggcggccccagcctcagttccagcgccaacgccagcaccggctgcggctccggttcccgctgcggctccagcctcatcctcagaccctgcggcagcagcggctgcaactgcggctcctggccagaccccggcctcagcgcaagctccagcgcagaccccagcgcccgctctgcctggtcctgctcttccagggcccttccccggcggccgcgtggtcaggctgcacccagtcattttggcctccattgtggacagctacgagagacgcaacgagggtgctgcccgagttatcgggaccctgttgggaactgtcgacaaacactcagtggaggtcaccaattgcttttcagtgccgcacaatgagtcagaagatgaagtggctgttgacatggaatttgctaagaatatgtatgaactgcataaaaaagtttctccaaatgagctcatcctgggctggtacgctacgggccatgacatcacagagcactctgtgctgatccatgagtactacagccgagaggcccccaaccccatccacctcactgtggacacaagtctccagaacggccgcatgagcatcaaagcctacgtcagcactttaatgggagtccctgggaggaccatgggagtgatgttcacgcctctgacagtgaaatacgcgtactacgacactgaacgcatcggagttgacctgatcatgaagacctgctttagccccaacagagtgattggactctcaagtgacttgcagcaagtaggaggggcatcagctcgcatccaggatgccctgagtacagtgttgcaatatgcagaggatgtactgtctggaaaggtgtcagctgacaatactgtgggccgcttcctgatgagcctggttaaccaagtaccgaaaatagttcccgatgactttgagaccatgctcaacagcaacatcaatgaccttttgatggtgacctacctggccaacctcacacagtcacagattgcactcaatgaaaaacttgtaaacctgtgaatggaccccaagcagtacacttgctggtctaggtattaaccccaggactcagaagtgaaggagaaatgggttttttgtggtcttgagtcacactgagatagtcagttgtgtgtgactctaataaacggagcctaccttttgtaaaaaaaaa

SEQ ID NO: 275 - DNA, 8368 bp, Homo sapiens
gcgatccgggcgccaccccgcggtcatcggtcaccggtcgctctcaggaacagcagcgcaacctctgctccctgcctcgcctcccgcgcgcctaggtgcctgcgactttaattaaagggccgtcccctcgccgaggctgcagcaccgcccccccggcttctcgcgcctcaaaatgagtagctcccactctcgggcgggccagagcgcagcaggcgcggctccgggcggcggcgtcgacacgcgggacgccgagatgccggccaccgagaaggacctggcggaggacgcgccgtggaagaagatccagcagaacactttcacgcgctggtgcaacgagcacctgaagtgcgtgagcaagcgcatcgccaacctgcagacggacctgagcgacgggctgcggcttatcgcgctgttggaggtgctcagccagaagaagatgcaccgcaagcacaaccagcggcccactttccgccaaatgcagcttgagaacgtgtcggtggcgctcgagttcctggaccgcgagagcatcaaactggtgtccatcgacagcaaggccatcgtggacgggaacctgaagctgatcctgggcctcatctggaccctgatcctgcactactccatctccatgcccatgtgggacgaggaggaggatgaggaggccaagaagcagacccccaagcagaggctcctgggctggatccagaacaagctgccgcagctgcccatcaccaacttcagccgggactggcagagcggccgggccctgggcgccctggtggacagctgtgccccgggcctgtgtcctgactgggactcttgggacgccagcaagcccgttaccaatgcgcgagaggccatgcagcaggcggatgactggctgggcatcccccaggtgatcacccccgaggagattgtggaccccaacgtggacgagcactctgtcatgacctacctgtcccagttccccaaggccaagctgaagccaggggctcccttgcgccccaaactgaacccgaagaaagcccgtgcctacgggccaggcatcgagcccacaggcaacatggtgaagaagcgggcagagttcactgtggagaccagaagtgctggccagggagaggtgctggtgtacgtggaggacccggccggacaccaggaggaggcaaaagtgaccgccaataacgacaagaaccgcaccttctccgtctggtacgtccccgaggtgacggggactcataaggttactgtgctctttgctggccagcacatcgccaagagccccttcgaggtgtacgtggataagtcacagggtgacgccagcaaagtgacagcccaaggtcccggcctggagcccagtggcaacatcgccaacaagaccacctactttgagatctttacggcaggagctggcacgggcgaggtcgaggttgtgatccaggaccccatgggacagaagggcacggtagagcctcagctggaggcccggggcgacagcacataccgctgcagctaccagcccaccatggagggcgtccacaccgtgcacgtcacgtttgccggcgtgcccatccctcgcagcccctacactgtcactgttggccaagcctgtaacccgagtgcctgccgggcggttggccggggcctccagcccaagggtgtgcgggtgaaggagacagctgacttcaaggtgtacacaaagggcgctggcagtggggagctgaaggtcaccgtgaagggccccaagggagaggagcgcgtgaagcagaaggacctgggggatggcgtgtatggcttcgagtattaccccatggtccctggaacctatatcgtcaccatcacgtggggtggtcagaacatcgggcgcagtcccttcgaagtgaaggtgggcaccgagtgtggcaatcagaaggtacgggcctggggccctgggctggagggcggcgtcgttggcaagtcagcagactttgtggtggaggctatcggggacgacgtgggcacgctgggcttctcggtggaagggccatcgcaggctaagatcgaatgtgacgacaagggcgacggctcctgtgatgtgcgctactggccgcaggaggctggcgagtatgccgttcacgtgctgtgcaacagcgaagacatccgcctcagccccttcatggctgacatccgtgacgcgccccaggacttccacccagacagggtgaaggcacgtgggcctggattggagaagacaggtgtggccgtcaacaagccagcagagttcacagtggatgccaagcacggtggcaaggccccacttcgggtccaagtccaggacaatgaaggctgccctgtggaggcgttggtcaaggacaacggcaatggcacttacagctgctcctacgtgcccaggaagccggtgaagcacacagccatggtgtcctggggaggcgtcagcatccccaacagccccttcagggtgaatgtgggagctggcagccaccccaacaaggtcaaagtatacggccccggagtagccaagacagggctcaaggcccacgagcccacctacttcactgtggactgcgccgaggctggccagggggacgtcagcatcggcatcaagtgtgcccctggagtggtaggccccgccgaagctgacatcgacttcgacatcatccgcaatgacaatgacaccttcacggtcaagtacacgccccggggggctggcagctacaccattatggtcctctttgctgaccaggccacgcccaccagccccatccgagtcaaggtggagccctctcatgacgccagtaaggtgaaggccgagggccctggcctcagtcgcactggtgtcgagcttggcaagcccacccacttcacagtaaatgccaaagctgctggcaaaggcaagctggacgtccagttctcaggactcaccaagggggatgcagtgcgagatgtggacatcatcgaccaccatgacaacacctacacagtcaagtacacgcctgtccagcagggtccagtaggcgtcaatgtcacttatggaggggatcccatccctaagagccctttctcagtggcagtatctccaagcctggacctcagcaagatcaaggtgtctggcctgggagagaaggtggacgttggcaaagaccaggagttcacagtcaaatcaaagggtgctggtggtcaaggcaaagtggcatccaagattgtgggcccctcgggtgcagcggtgccctgcaaggtggagccaggcctgggggctgacaacagtgtggtgcgcttcctgccccgtgaggaagggccctatgaggtggaggtgacctatgacggcgtgcccgtgcctggcagcccctttcctctggaagctgtggcccccaccaagcctagcaaggtgaaggcgtttgggccggggctgcagggaggcagtgcgggctcccccgcccgcttcaccatcgacaccaagggcgccggcacaggtggcctgggcctgacggtggagggcccctgtgaggcgcagctcgagtgcttggacaatggggatggcacatgttccgtgtcctacgtgcccaccgagcccggggactacaacatcaacatcctcttcgctgacacccacatccctggctccccattcaaggcccacgtggttccctgctttgacgcatccaaagtcaagtgctcaggccccgggctggagcgggccaccgctggggaggtgggccaattccaagtggactgctcgagcgcgggcagcgcggagctgaccattgagatctgctcggaggcggggcttccggccgaggtgtacatccaggaccacggtgatggcacgcacaccattacctacattcccctctgccccggggcctacaccgtcaccatcaagtacggcggccagcccgtgcccaacttccccagcaagctgcaggtggaacctgcggtggacacttccggtgtccagtgctatgggcctggtattgagggccagggtgtcttccgtgaggccaccactgagttcagtgtggacgcccgggctctgacacagaccggagggccgcacgtcaaggcccgtgtggccaacccctcaggcaacctgacggagacctacgttcaggaccgtggcgatggcatgtacaaagtggagtacacgccttacgaggagggactgcactccgtggacgtgacctatgacggcagtcccgtgcccagcagccccttccaggtgcccgtgaccgagggctgcgacccctcccgggtgcgtgtccacgggccaggcatccaaagtggcaccaccaacaagcccaacaagttcactgtggagaccaggggagctggcacgggcggcctgggcctggctgtagagggcccctccgaggccaagatgtcctgcatggataacaaggacggcagctgctcggtcgagtacatcccttatgaggctggcacctacagcctcaacgtcacctatggtggccatcaagtgccaggcagtcctttcaaggtccctgtgcatgatgtgacagatgcgtccaaggtcaagtgctctgggcccggcctgagcccaggcatggttcgtgccaacctccctcagtccttccaggtggacacaagcaaggctggtgtggccccattgcaggtcaaagtgcaagggcccaaaggcctggtggagccagtggacgtggtagacaacgctgatggcacccagaccgtcaattatgtgcccagccgagaagggccctacagcatctcagtactgtatggagatgaagaggtaccccggagccccttcaaggtcaaggtgctgcctactcatgatgccagcaaggtgaaggccagtggccccgggctcaacaccactggcgtgcctgccagcctgcccgtggagttcaccatcgatgcaaaggacgccggggagggcctgctggctgtccagatcacggatcccgaaggcaagccgaagaagacacacatccaagacaaccatgacggcacgtatacagtggcctacgtgccagacgtgacaggtcgctacaccatcctcatcaagtacggtggtgacgagatccccttctccccgtaccgcgtgcgtgccgtgcccaccggggacgccagcaagtgcactgtcacagtgtcaatcggaggtcacgggctaggtgctggcatcggccccaccattcagattggggaggagacggtgatcactgtggacactaaggcggcaggcaaaggcaaagtgacgtgcaccgtgtgcacgcctgatggctcagaggtggatgtggacgtggtggagaatgaggacggcactttcgacatcttctacacggccccccagccgggcaaatacgtcatctgtgtgcgctttggtggcgagcacgtgcccaacagccccttccaagtgacggctctggctggggaccagccctcggtgcagccccctctacggtctcagcagctggccccacagtacacctacgcccagggcggccagcagacttgggccccggagaggcccctggtgggtgtcaatgggctggatgtgaccagcctgaggccctttgaccttgtcatccccttcaccatcaagaagggcgagatcacaggggaggttcggatgccctcaggcaaggtggcgcagcccaccatcactgacaacaaagacggcaccgtgaccgtgcggtatgcacccagcgaggctggcctgcacgagatggacatccgctatgacaacatgcacatcccaggaagccccttgcagttctatgtggattacgtcaactgtggccatgtcactgcctatgggcctggcctcacccatggagtagtgaacaagcctgccaccttcaccgtcaacaccaaggatgcaggagaggggggcctgtctctggccattgagggcccgtccaaagcagaaatcagctgcactgacaaccaggatgggacatgcagcgtgtcctacctgcctgtgctgccgggggactacagcattctagtcaagtacaatgaacagcacgtcccaggcagccccttcactgctcgggtcacaggtgacgactccatgcgtatgtcccacctaaaggtcggctctgctgccgacatccccatcaacatctcagagacggatctcagcctgctgacggccactgtggtcccgccctcgggccgggaggagccctgtttgctgaagcggctgcgtaatggccacgtggggatttcattcgtgcccaaggagacgggggagcacctggtgcatgtgaagaaaaatggccagcacgtggccagcagccccatcccggtggtgatcagccagtcggaaattggggatgccagtcgtgttcgggtctctggtcagggccttcacgaaggccacacctttgagcctgcagagtttatcattgatacccgcgatgcaggctatggtgggctcagcctgtccattgagggccccagcaaggtggacatcaacacagaggacctggaggacgggacgtgcagggtcacctactgccccacagagccaggcaactacatcatcaacatcaagtttgccgaccagcacgtgcctggcagccccttctctgtgaaggtgacaggcgagggccgggtgaaagagagcatcacccgcaggcgtcgggctccttcagtggccaacgttggtagtcattgtgacctcagcctgaaaatccctgaaattagcatccaggatatgacagcccaggtgaccagcccatcgggcaagacccatgaggccgagatcgtggaaggggagaaccacacctactgcatccgctttgttcccgctgagatgggcacacacacagtcagcgtcaagtacaagggccagcacgtgcctgggagccccttccagttcaccgtggggcccctaggggaagggggagcccacaaggtccgagctgggggccctggcctggagagagctgaagctggagtgccagccgaattcagtatctggacccgggaagctggtgctggaggcctggccattgctgtcgagggccccagcaaggctgagatctcttttgaggaccgcaaggacggctcctgtggtgtggcttatgtggtccaggagccaggtgactacgaagtctcagtcaagttcaacgaggaacacattcccgacagccccttcgtggtgcctgtggcttctccgtctggcgacgcccgccgcctcactgtttctagccttcaggagtcagggctaaaggtcaaccagccagcctcttttgcagtcagcctgaacggggccaagggggcgatcgatgccaaggtgcacagcccctcaggagccctggaggagtgctatgtcacagaaattgaccaagataagtatgctgtgcgcttcatccctcgggagaatggcgtttacctgattgacgtcaagttcaacggtacccacatccctggaagccccttcaagatccgagttggggagcctgggcatggaggggacccaggcttggtgtctgcttacggagcaggtctggaaggcggtgtcacagggaacccagctgagttcgtcgtgaacacgagcaatgcgggagctggtgccctgtcggtgaccattgacggcccctccaaggtgaagatggattgccaggagtgccctgagggctaccgcgtcacctatacccccatggcacctggcagctacctcatctccatcaagtacggcggcccctaccacattgggggcagccccttcaaggccaaagtcacaggcccccgtctcgtcagcaaccacagcctccacgagacatcatcagtgtttgtagactctctgaccaaggccacctgtgccccccagcatggggccccgggtcctgggcctgctgacgccagcaaggtggtggccaagggcctggggctgagcaaggcctacgtaggccagaagagcagcttcacagtagactgcagcaaagcaggcaacaacatgctgctggtgggggttcatggcccaaggaccccctgcgaggagatcctggtgaagcacgtgggcagccggctctacagcgtgtcctacctgctcaaggacaagggggagtacacactggtggtcaaatgggggcacgagcacatcccaggcagcccctaccgcgttgtggtgccctgagtctggggcccgtgccagccggcagcccccaagcctgccccgctacccaagcagccccgccctcttcccctcaaccccggcccaggccgccctggccgcccgcctgtcactgcagctgcccctgccctgtgccgtgctgcgctcacctgcctccccagccagccgctgacctctcggctttcacttgggcagagggagccatttggtggcgctgcttgtcttctttggttctgggaggggtgagggatgggg

SEQ ID NO: 276 - DNA, 4803 bp, Homo sapiens
gcggctgcctagttgacgcacccattgagtcgctggcttctttgcagcgcttcagcgttttcccctggagggcgcctccatccttggaggcctagtgccgtcggagaagagagcgggagccgcggacagagacgcgtgcgcaattcggagccgactctgggtgcggactgtgggagctgactctgggtagccggctgcgcgtggctggggaggcgaggccggacgcacctctgtttgggggtcctcagagattaatgattcatcaagggatagttgtactgttctcgtgggaatcacttcatcatgcgaaatctgaaattatttcggaccctggagttcagggatattcaaggtccagggaatcctcagtgcttctctctccgaactgaacaggggacggtgctcattggttcagaacatggcctgatagaagtagaccctgtctcaagagaagtgaaaaatgaagtttctttggtggcagaaggctttcttccagaggatggaagtggccgcattgttggtgttcaggacttgctggatcaggagtctgtgtgtgtggccacagcctctggagacgtcatactctgcagtctcagcacacaacagctggagtgtgttgggagtgtagccagtggtatctctgttatgagttggagtcctgaccaagagctggtgcttcttgccacaggtcaacagaccctgattatgatgacaaaagattttgagccaatcctggagcagcagatccatcaggatgattttggtgaaagcaagtttatcactgttggatggggtaggaaggagacacagttccatggatcagaaggcagacaagcagcttttcagatgcaaatgcatgagtctgctttgccctgggatgaccatagaccacaagttacctggcggggggatggacagttttttgctgtgagtgttgtttgcccagaaacaggggctcggaaggtcagagtgtggaaccgagagtttgctttgcagtcaaccagtgagcctgtggcaggactgggaccagccctggcttggaaaccctcaggcagtttgattgcatctacacaagataaacccaaccagcaggatattgtgttttttgagaaaaatggactccttcatggacactttacacttcccttccttaaagatgaggttaaggtaaatgacttgctctggaatgcagattcctctgtgcttgcagtccggctggaagaccttcagagagaaaaaagctccattccgaaaacctgtgttcagctctggactgttggaaactatcactggtatctcaagcaaagtttatccttcagcacctgtgggaagagcaagattgtgtctctgatgtgggaccctgtgaccccataccggctgcatgttctctgtcagggctggcattacctcgcctatgattggcactggacgactgaccggagcgtgggagataattcaagtgacttgtccaatgtggctgtcattgatggaaacagggtgttggtgacagtcttccggcagactgtggttccgcctcccatgtgcacctaccaactgctgttcccacaccctgtgaatcaagtcacattcttagcacaccctcaaaagagtaatgaccttgctgttctagatgccagtaaccagatttctgtttataaatgtggtgattgtccaagtgctgaccctacagtgaaactgggagctgtgggtggaagtggatttaaagtttgccttagaactcctcatttggaaaagagatacaaaatccagtttgagaataatgaagatcaagatgtaaacccgctgaaactaggccttctcacttggattgaagaagacgtcttcctggctgtaagccacagtgagttcagcccccggtctgtcattcaccatttgactgcagcttcttctgagatggatgaagagcatggacagctcaatgtcagttcatctgcagcggtggatggggtcataatcagtctatgttgcaattccaagaccaagtcagtagtattacagctggctgatggccagatatttaagtacctttgggagtcaccttctctggctattaaaccatggaagaactctggtggatttcctgttcggtttccttatccatgcacccagaccgaattggccatgattggagaagaggaatgtgtccttggtctgactgacaggtgtcgctttttcatcaatgacattgaggttgcgtcaaatatcacgtcatttgcagtatatgatgagtttttattgttgacaacccattcccatacctgccagtgtttttgcctgagggatgcttcatttaaaacattacaggccggcctgagcagcaatcatgtgtcccatggggaagttctgcggaaagtggagaggggttcacggattgtcactgttgtgccccaggacacaaagcttgtattacagatgccaaggggaaacttagaagttgttcatcatcgagccctggttttagctcagattcggaagtggttggacaaacttatgtttaaagaggcatttgaatgcatgagaaagctgagaatcaatctcaatccgatttatgatcataaccctaaggtgtttcttggaaatgtggaaaccttcattaaacagatagattctgtgaatcatattaacttgttttttacagaattgaaagaagaagatgtcacgaagaccatgtaccctgcaccagttaccagcagtgtctacctgtccagggatcctgacgggaataaaatagaccttgtctgcgatgctatgagagcagtcatggagagcataaatcctcataaatactgcctatccatacttacatctcatgtaaagaagacaaccccagaactggaaattgtactgcaaaaagtacacgagcttcaaggaaatgctccctctgatcctgatgctgtgagtgctgaagaggccttgaaatatttgctgcatctggtagatgttaatgaattatatgatcattctcttggcacctatgactttgatttggtcctcatggtagctgagaagtcacagaaggatcccaaagaatatcttccatttcttaatacacttaagaaaatggaaactaattatcagcggtttactatagacaaatacttgaaacgatatgaaaaagccattggccacctcagcaaatgtggacctgagtacttcccagaatgcttaaacttgataaaagataaaaacttgtataacgaagctctgaagttatattcaccaagctcacaacagtaccaggatatcagcattgcttatggggagcacctgatgcaggagcacatgtatgagccagcggggctcatgtttgcccgttgcggtgcccacgagaaagctctctcagcctttctcacatgtggcaactggaagcaagccctctgtgtggcagcccagcttaactttaccaaagaccagctggtgggcctcggcagaactctggcaggaaagctggttgagcagaggaagcacattgatgcggccatggttttggaagagtgtgcccaggattatgaagaagctgtgctcttgctgttagaaggagctgcctgggaagaagctttgaggctggtatacaaatataacagactggatattatagaaaccaacgtaaagccttccattttagaagcccagaaaaattatatggcatttctggactctcagacagccacattcagtcgccacaagaaacgtttattggtagttcgagagctcaaggagcaagcccagcaggcaggtctggatgatgaggtaccccacgggcaagagtcagacctcttctctgaaactagcagtgtcgtgagtggcagtgagatgagtggcaaatactcccatagtaactccaggatatcagcgagatcatccaagaatcgccgaaaagcggagcggaagaagcacagcctcaaagaaggcagtccgctggaggacctggccctcctggaggcactgagtgaagtggtgcagaacactgaaaacctgaaagatgaagtataccatattttaaaggtactctttctctttgagtttgatgaacaaggaagggaattacagaaggcctttgaagatacgctgcagttgatggaaaggtcacttccagaaatttggactcttacttaccagcagaattcagctaccccggttctaggtcccaattctactgcaaatagtatcatggcatcttatcagcaacagaagacttcggttcctgttcttgatgctgagctttttataccaccaaagatcaacagaagaacccagtggaagctgagcctgctagactgagtgactgcagttaggagggatccgacagagaagaccatttccactcattcctgttgtcctaccaccccttgctctttgagggctggctattgagaactggaaagagtaaaatgataacttaccttagcattgccaagaacttcagcagacaacaagcaattctatttattttatgttgtgtatacatcttgatcattagcaagacattaagctttaaccattatggcaccattttgtgagaatgattgttctttcacttgggctgtttgagagcataattatggtaatcatgagattaatgtttcatgatttctacctccaaagtgtgaagacaagtaaaacaatgtttctaaattgtcttattttgttggcggagaagattacaatggctattagtgctacatttggtcaaatgtaatcacttaaatagcttcttgtcaccttaaactaaagcagaataaaaagtatcctttgaaattaaaaaaaacaaaaaagctaaaa

SEQ ID NO: 277 - DNA, 3548 bp, Homo sapiens
tggccgaagcagggggacagcaagggacgctcaggcggggaccatggcggacggcggctcggagcgggctgacgggcgcatcgtcaagatggaggtggactacagcgccacggtggatcagcgcctacccgagtgtgcgaagctagccaaggaaggaagacttcaagaagtcattgaaacccttctctctctggaaaagcagactcgtactgcttccgatatggtatcgacatcccgtatcttagttgcagtagtgaagatgtgctatgaggctaaagaatgggatttacttaatgaaaatattatgcttttgtccaaaaggcggagtcagttaaaacaagctgttgccaaaatggttcaacagtgctgtacttatgttgaggaaatcacagaccttcctatcaaacttcgattaattgatactctacgaatggttaccgaaggcaagatttatgttgaaattgagcgtgcgcgactgactaaaacattagcaactataaaagaacaaaatggtgatgtgaaagaggcagcctccattttacaggagttacaggtggaaacctacgggtcaatggaaaagaaagagcgagtggaatttattttggagcaaatgaggctctgcctagctgtgaaggattacattcgaacacaaatcatcagcaagaaaattaacaccaaatttttccaggaagaaaatacagagaaattaaagttgaagtactataatttaatgattcagctggatcaacatgagggatcctatttgtctatttgtaagcactacagagcaatatatgatactccctgtatacaggcagaaagtgaaaaatggcagcaggctctgaagagtgttgtactctatgttatcctggctccttttgacaatgaacagtcagatttggttcaccgaataagtggtgacaagaagttagaagaaattcccaaatacaaggatcttttaaagctttttaccacaatggagttgatgcgttggtccacacttgttgaggactatggaatggaattaagaaaaggttcccttgagagtcctgcaacggatgtttttggttctacagaggaaggtgaaaaaaggtggaaagacttgaagaacagagttgttgaacataatattagaataatggccaagtattatactcggataacaatgaaaaggatggcacagcttctggatctatctgttgatgagtccgaagcctttctctcaaatctagtagttaacaagaccatctttgctaaagtagacagattagcaggaattatcaacttccagagacccaaggatccaaataatttattaaatgactggtctcagaaactgaactcattaatgtctctggttaacaaaactacgcatctcatagccaaagaggagatgatacataatctacaataagggtcttagtgctttagaaaaaagttaaaattggaagtcattaaaaaaagactgttataatggtgtatatgttggggttttttttctaagcttctttgtcttaaattttaaaatagtgaatatgtttgagactccctttgacctttcagttccccaagttcattgttaactttgcatttgcaattggtgcaaaaatacagatttctgtcgtctgaatacacaaaaagttgtgtcataacttacccagatatgtttttctatcatttgaaacctttttagctactgtttgttttcattcaactaacaaacatattccaataataaaagcagtatatacatatttcctttctacagttacctctgattctcaacattttgtggggtagtgatttggcaagtgttttttaaataaaacaaatctcattgtaaagttatcagtcatttagtagaatagaaaagcaacatagagcatacaagaacatttgggatagagttgtgatttgtgaagaatttgtactttgatattgtggcggaaagtctagactgagtgtgtatgctggtaaactgtagacttttttttttttttttgagtccggctggttccaatcacagtagcttgattgctttcagccctcatcctctcacttgatcagttgttcaacagaatcagctgacataattgacacagtttattgggtgttaagtccgctctatagggatagtgactacttttttttttttttttttttttgctcttcttcctctcccctttctttatatgggtttaaatttaacataaagttgtttttataaggcttatttgtggctttaacttgtaagtctgattacatcattattgttccaaattcattatctctgtaggaacttttagttccattatatgaacactggataacctaattttttttaatgctttaaaaaaatggcaaaaagacgtcaggccaccctcatagtaagtggtgtagtattaaaatattttcacggaattaaaagtagcttgctgtcaaagaaacacctgagatgaattggtgtgaacgaattttgcaagtttaatttgatttatttcagagaaaatagaaaaaacaatgttagaaggttatttaaaatgatacttaaataaagaaagtgtgaggtctactttaaaaaaattcaaatgaagagaaaaagaaaaacagcattctagaaatggcatttctcctaattaattttccacttaatggaagattatcaattgtcctattttatgatcccaggactgaagacagttgtgggatatctgtcatatttatcctgtgagtcattgtgaataatgacatacagtactgaagtaatctgattttattctttggaaattcaatgcattggtcacactaataacatcaacatctgctatcacttatctttttaaaactaaccaaaaaaggctgggattacaggcatgagccactgcacccaactcctctttcgtctttctttaacacacactaggctctttgtgtattatgattcagtgctatttgtaactgtgtcccagtgaccaaattgcactcgactcgatcagctgttcatccatttcgtgttttttcctgtcaaacattaatccagcaaatatatgaggtatttaccaatttattttcttagtattacaaaataattcattagcataaagtacaatagtgaaatatttgagttgttcggaacctcaattaatcctgttttacatttcagacctaaagctggcaatcaggagaagaagcactttgttttaaatgtggagaagataacacttgattccatttcattgtcattagtgtattaaccagcaggagaggtgatgagccatttttcaaatgaaataccttttatttccatataatttttttattttagagttcaatagctgtttctatgattatcctcaatttccatatgttactgaatctgaaaaacatctttaaaattcaaacagttccattttctctcttgtaagtgttaaatgtgataaaagtacatattttaaattgttttcagctcttggatatagcagcaataaaaacactaatttgtgggtatttaagaaaacctggagaataaactcatactttaaaagatc

SEQ ID NO: 278 - DNA, 4022 bp, Homo sapiens
gtacgtgcgcgtctccctgccgccgccgccgcccgccgcgggccgccccggggccgccgtcgccgacgacgcgcgggaggaggaggaggaggccgccccgccgccgccgccgccgccgccgccccggctcgccgccgcccgcccgccgggctcgcagccccggcccccggccgcaggcgaggcccaggccgcggccgacatgaaccaccagcagcagcagcagcagcagaaagcgggcgagcagcagttgagcgagcccgaggacatggagatggaagcgggagatacagatgacccaccaagaattactcagaaccctgtgatcaatgggaatgtggccctgagtgatggacacaacaccgcggaggaggacatggaggatgacaccagttggcgctccgaggcaacctttcagttcactgtggagcgcttcagcagactgagtgagtcggtccttagccctccgtgttttgtgcgaaatctgccatggaagattatggtgatgccacgcttttatccagacagaccacaccaaaaaagcgtaggattctttctccagtgcaatgctgaatctgattccacgtcatggtcttgccatgcacaagcagtgctgaagataataaattacagagatgatgaaaagtcgttcagtcgtcgtattagtcatttgttcttccataaagaaaatgattggggattttccaattttatggcctggagtgaagtgaccgatcctgagaaaggatttatagatgatgacaaagttacctttgaagtctttgtacaggcggatgctccccatggagttgcgtgggattcaaagaagcacacaggctacgtcggcttaaagaatcagggagcgacttgttacatgaacagcctgctacagacgttatttttcacgaatcagctacgaaaggctgtgtacatgatgccaaccgagggggatgattcgtctaaaagcgtccctttagcattacaaagagtgttctatgaattacagcatagtgataaacctgtaggaacaaaaaagttaacaaagtcatttgggtgggaaactttagatagcttcatgcaacatgatgttcaggagctttgtcgagtgttgctcgataatgtggaaaataagatgaaaggcacctgtgtagagggcaccatacccaaattattccgcggcaaaatggtgtcctatatccagtgtaaagaagtagactatcggtctgatagaagagaagattattatgatatccagctaagtatcaaaggaaagaaaaatatatttgaatcatttgtggattatgtggcagtagaacagctcgatggggacaataaatacgacgctggggaacatggcttacaggaagcagagaaaggtgtgaaattcctaacattgccaccagtgttacatctacaactgatgagatttatgtatgaccctcagacggaccaaaatatcaagatcaatgataggtttgaattcccagagcagttaccacttgatgaatttttgcaaaaaacagatcctaaggaccctgcaaattatattcttcatgcagtcctggttcatagtggagataatcatggtggacattatgtggtttatctaaaccccaaaggggatggcaaatggtgtaaatttgatgacgacgtggtgtcaaggtgtactaaagaggaagcaattgagcacaattatgggggtcacgatgacgacctgtctgttcgacactgcactaatgcttacatgttagtctacatcagggaatcaaaactgagtgaagttttacaggcggtcaccgaccatgatattcctcagcagttggtggagcgattacaagaagagaaaaggatcgaggctcagaagcggaaggagcggcaggaagcccatctctatatgcaagtgcagatagtcgcagaggaccagttttgtggccaccaagggaatgacatgtacgatgaagaaaaagtgaaatacactgtgttcaaagtattgaagaactcctcgcttgctgagtttgttcagagcctctctcagaccatgggatttccacaagatcaaattcgattgtggcccatgcaagcaaggagtaatggaacaaaacgaccagcaatgttagataatgaagccgacggcaataaaacaatgattgagctcagtgataatgaaaacccttggacaatattcctggaaacagttgatcccgagctggctgctagtggagcgaccttacccaagtttgataaagatcatgatgtaatgttatttttgaagatgtatgatcccaaaacgcggagcttgaattactgtgggcatatctacacaccaatatcctgtaaaatacgtgacttgctcccagttatgtgtgacagagcaggatttattcaagatactagccttatcctctatgaggaagttaaaccgaatttaacagagagaattcaggactatgacgtgtctcttgataaagcccttgatgaactaatggatggtgacatcatagtatttcagaaggatgaccctgaaaatgataacagtgaattacccaccgcaaaggagtatttccgagatctctaccaccgcgttgatgtcattttctgtgataaaacaatccctaatgatcctggatttgtggttacgttatcaaatagaatgaattattttcaggttgcaaagacagttgcacagaggctcaacacagatccaatgttgctgcagtttttcaagtctcaaggttatagggatggcccaggtaatcctcttagacataattatgaaggtactttaagagatcttctacagttcttcaagcctagacaacctaagaaactttactatcagcagcttaagatgaaaatcacagactttgagaacaggcgaagttttaaatgtatatggttaaacagccaatttagggaagaggaaataacactatatccagacaagcatgggtgtgtccgggacctgttagaagaatgtaaaaaggccgtggagcttggggagaaagcatcagggaaacttaggctgctagaaattgtaagctacaaaatcattggtgttcatcaagaagatgaactattagaatgtttatctcctgcaacgagccggacgtttcgaatagaggaaatccctttggaccaggtggacatagacaaagagaatgagatgcttgtcacagtggcgcatttccacaaagaggtcttcggaacgttcggaatcccgtttttgctgaggatacaccagggcgagcattttcgagaagtgatgaagcgaatccagagcctgctggacatccaggagaaggagtttgagaagtttaaatttgcaattgtaatgacgggccgacaccagtacataaatgaagacgagtatgaagtaaatttgaaagactttgagccacagcccggtaatatgtctcatcctcggccttggctagggctcgaccacttcaacaaagccccaaagaggagtcgctacacttaccttgaaaaggccattaaaatccataactgatttccaagctggtgtgttcaaggcgaggacggtgtgtgggtggccccttaacagcctagaactttggtgcacgtgccctctagccgaagtcttcagcaagaggattcgctgctggtgttaattttattttattgaggctgttcagtttggcttctctgtatctattgactgccctttttgagcaaaatgaagatgtttttataaagcttggatgccaatgagagttattttatggtaaccacagtgcaaggcaactgtcagcgcaatgggggagaagaggttagtggatcgggggtccctggctcaaggtctctgggctgtccctagtgggcacgagtggctcggctgccttcctggggtcccgtgcaccagccctgcagctagcaagtcttgtgtttaggctcgtctgacctatttccttcagttatactttcaatgaccttttgtgcatctgttaaggcaaaacagagaaactcacaacctaataaatagcgctcttcccttcaaaaaaaaa

SEQ ID NO: 279 - DNA, 3403 bp, Homo sapiens
caggtctgaggcgaagctaggtgagccgtgggaagaaaagagggagcagctagggcgcgggtctccctcctcccggagtttggaacggctgaagttcaccttccagcccctagcgccgttcgcgccgctaggcctggcttctgaggcggttgcggtgctcggtcgccgcctaagcggggcagggtgcgaacaggggcttcgggccacgcttctcttggcgacaggattttgctgtgaagtccgtccgggaaacggaggaaaaaaagagttgcgggaggctgtctgctaataacggttcttgatacatatttgccagacttcaagatttcagaaaaggggtgaaagagaagattgcaactttgagtcagacctgtaggcctgatagactgattaaaccacagaaggtgacctgctgagaaaagtggtacaaatactgggaaaaacctgctcttctgcgttaagtgggagacaatgtcacaagttaaaagctcttattcctatgatgccccctcggatttcatcaatttttcatccttggatgatgaaggagatactcaaaacatagattcatggtttgaggagaaggccaatttggagaataagttactggggaagaatggaactggagggctttttcagggcaaaactcctttgagaaaggctaatcttcagcaagctattgtcacacctttgaaaccagttgacaacacttactacaaagaggcagaaaaagaaaatcttgtggaacaatccattccgtcaaatgcttgttcttccctggaagttgaggcagccatatcaagaaaaactccagcccagcctcagagaagatctcttaggctttctgctcagaaggatttggaacagaaagaaaagcatcatgtaaaaatgaaagccaagagatgtgccactcctgtaatcatcgatgaaattctaccctctaagaaaatgaaagtttctaacaacaaaaagaagccagaggaagaaggcagtgctcatcaagatactgctgaaaacaatgcatcttccccagagaaagccaagggtagacatactgtgccttgtatgccacctgcaaagcagaagtttctaaaaagtactgaggagcaagagctggagaagagtatgaaaatgcagcaagaggtggtggagatgcggaaaaagaatgaagaattcaagaaacttgctctggctggaatagggcaacctgtgaagaaatcagtgagccaggtcaccaaatcagttgacttccacttccgcacagatgagcgaatcaaacaacatcctaagaaccaggaggaatataaggaagtgaactttacatctgaactacgaaagcatccttcatctcctgcccgagtgactaagggatgtaccattgttaagcctttcaacctgtcccaaggaaagaaaagaacatttgatgaaacagtttctacatatgtgccccttgcacagcaagttgaagacttccataaacgaacccctaacagatatcatttgaggagcaagaaggatgatattaacctgttaccctccaaatcttctgtgaccaagatttgcagagacccacagactcctgtactgcaaaccaaacaccgtgcacgggctgtgacctgcaaaagtacagcagagctggaggctgaggagctcgagaaattgcaacaatacaaattcaaagcacgtgaacttgatcccagaatacttgaaggtgggcccatcttgcccaagaaaccacctgtgaaaccacccaccgagcctattggctttgatttggaaattgagaaaagaatccaggagcgagaatcaaagaagaaaacagaggatgaacactttgaatttcattccagaccttgccctactaagattttggaagatgttgtgggtgttcctgaaaagaaggtacttccaatcaccgtccccaagtcaccagcctttgcattgaagaacagaattcgaatgcccaccaaagaagatgaggaagaggacgaaccggtagtgataaaagctcaacctgtgccacattatggggtgccttttaagccccaaatcccagaggcaagaactgtggaaatatgccctttctcgtttgattctcgagacaaagaacgtcagttacagaaggagaagaaaataaaagaactgcagaaaggggaggtgcccaagttcaaggcacttcccttgcctcattttgacaccattaacctgccagagaagaaggtaaagaatgtgacccagattgaacctttctgcttggagactgacagaagaggtgctctgaaggcacagacttggaagcaccagctggaagaagaactgagacagcagaaagaagcagcttgtttcaaggctcgtccaaacaccgtcatctctcaggagccctttgttcccaagaaagagaagaaatcagttgctgagggcctttctggttctctagttcaggaaccttttcagctggctactgagaagagagccaaagagcggcaggagctggagaagagaatggctgaggtagaagcccagaaagcccagcagttggaggaggccagactacaggaggaagagcagaaaaaagaggagctggccaggctacggagagaactggtgcataaggcaaatccaatacgcaagtaccagggtctggagataaagtcaagtgaccagcctctgactgtgcctgtatctcccaaattctccactcgattccactgctaaactcagctgtgagctgcggataccgcccggcaatgggacctgctcttaacctcaaacctaggaccgtcttgctttgtcattgggcatggagagaacccatttctccagacttttacctacccgtgcctgagaaagcatacttgacaactgtggactccagttttgttgagaattgttttcttacattactaaggctaataatgagatgtaactcatgaatgtctcgattagactccatgtagttacttcctttaaaccatcagccggccttttatatgggtcttcactctgactagaatttagtctctgtgtcagcacagtgtaatctctattgctattgccccttacgactctcaccctctccccactttttttaaaaattttaaccagaaaataaagatagttaaatcctaagatagagattaagtcatggtttaaatgaggaacaatcagtaaatcagattctgtcctcttctctgcataccgtgaatttatagttaaggatccctttgctgtgagggtagaaaacctcaccaactgcaccagtgaggaagaagactgcgtggattcatggggagcctcacagcagccacgcagcaggctctgggtggggctgccgttaaggcacagttctttccttactggtgctgataacaacagggaaccgtgcagtgtgcattttaagacc

SEQ ID NO: 280 - DNA, 6428 bp, Homo sapiens
gctagtggaagttactgccgcgccaccgagtccggaccggagactttggggcctaactagtgaatggtagtgtctagaaagggtatgtcccttcaagagagaggtgccaatgtccaaccggcctaataacaatccaggggggtcactgcgacgttcacagaggaacactgccggggcccaaccacaagacgactcaataggaggaagaagctgcagttcatcatctgctgtgatagttccacaaccagaggatccagacagagccaatacttcagaaagacaaaaaacggggcaggtgcctaagaaagacaattctcgaggagtgaagcgcagtgctagtccagactacaacaggaccaattctcctagctctgcaaaaaaaccaaaagcacttcagcatactgaatctccctcagaaacaaataagccacatagtaagtcaaagaagagacatttagaccaggagcaacaactgaaatctgcacaatcaccatcaacaagcaaggctcataccaggaagagtggggccactggcggttcacggagtcagaaaagaaaaaggacagagagttcttgtgtaaagagtggctccgggtctgaatcaactggtgcagaagagagatctgcgaaacctaccaagctggcttcaaaatcagccacctcagccaaagctgggtgtagcaccatcactgattcttcttctgctgcctctacttcctcctcgtcttctgctgtagcctcggcctcctccactgtaccaccaggtgccagagtgaaacaaggaaaagatcagaacaaggccaggcgttcccgttcagcgtccagtcccagccccagaagaagtagcagggaaaaggaacagagtaaaactggtggctcttcaaaatttgattgggctgctcgtttcagccctaaagttagccttcctaaaacaaaactgtctcttccagggtcttctaagtcagagacatcaaaacctggaccttctggattacaggccaaattagcaagtttaagaaaatctacgaagaaacgcagtgagtctccacctgctgagctccccagtttgaggcggagcacacgccaaaagaccacgggctcctgtgctagtaccagtcggcgaggctctggcctgggcaaaagaggagcagctgaagctcgtcgacaggagaaaatggcagaccctgaaagcaaccaggaggcagtaaattcttcagctgctcggacagatgaagctccccaaggagctgcaggggctgttggcatgaccacctctggggagagtgaatcagatgattccgagatgggacgtttgcaagctttgttagaggcaaggggtcttccccctcacctatttggtcctcttggtcctcggatgtcacagcttttccatagaacaattggaagtggagctagttctaaggcccagcagctactacaaggattgcaagccagtgatgaaagtcaacagcttcaggcagttattgagatgtgtcagttactggtcatgggaaatgaggagacactgggagggtttcctgtcaagagtgttgttccagctttgattacgttacttcagatggagcacaattttgatattatgaaccatgcttgtcgagccttaacatacatgatggaagcacttcctcgatcttctgctgttgtagtagatgctattcctgtctttttagaaaagctgcaagttattcagtgtattgatgtggcagagcaggccttgactgccttggagatgttgtcacggagacatagtaaagccattctacaggcgggtggtttggcagactgcttgctgtacctagaattcttcagcataaatgcccaaagaaatgcattagcaattgcagctaattgctgccagagtatcacgccagatgaatttcattttgtggcagattcactcccattgctaacccaaaggctaacacatcaggataaaaagtcagtagaaagcacttgcctttgttttgcacgcctagtggacaacttccagcatgaggagaatttactccagcaggttgcttccaaagatctgcttacaaatgttcaacagctgttggtagtgactccacccattttaagttctgggatgtttataatggtggttcgcatgttttctctgatgtgttccaactgtccaactttagctgttcaacttatgaaacaaaacattgcagaaacgcttcactttctcctgtgtggtgcctccaatggaagttgtcaggaacagattgatcttgttccacgaagccctcaagagttgtatgaactgacatctctgatttgtgaacttatgccatgtttaccaaaagaaggcatttttgcagttgataccatgttgaagaagggaaatgcacagaacacagatggtgcgatatggcagtggcgtgatgatcggggcctctggcatccatataacaggattgacagccggatcattgagcaaatcaatgaggacacgggaacagcacgtgccattcagagaaaacctaacccgttagccaatagtaacactagtggatattcagagtcaaagaaggatgatgctcgagcacagcttatgaaagaggatccggaactggctaagtcttttattaagacattatttggtgttctttatgaagtgtatagttcctcagcaggacctgcggtcagacataagtgccttagagcaattcttaggataatttattttgcggatgctgaacttctgaaggatgttctgaaaaatcatgctgtttcaagtcacattgcttccatgctgtcaagccaagacctgaagatagtagtgggagcacttcagatggcagaaattttaatgcagaagttacctgatatttttagtgtttacttcagaagagaaggtgtaatgcatcaagtaaaacacttagcagaatcagagtctttgttgacaagtccaccaaaggcatgtacgaatggatcgggatccatgggatccacaacttcagtcagcagtgggacagccacagctgccactcatgctgcagctgacttgggatcacccagcttgcagcacagcagggatgattctttagatctcagccctcaaggtcgattaagtgatgttctaaagagaaaacgactgccaaaacgagggccaagaaggccaaagtactcacctccaagagatgatgacaaagtagacaatcaagctaaaagccccaccactactcagtcacctaaatcttctttcctggcaagcttgaatccaaaaacatggggaaggttaagtacacagtccaacagcaacaacattgagccagcacggactgcgggaggtagtggccttgccagggctgcctcaaaggataccatctccaataatagagaaaaaattaaaggttggattaaggagcaggcacataaatttgtagaacgttatttcagttctgagaatatggatggaagcaaccctgcattgaatgtccttcagagactttgtgctgcaaccgaacaactcaacctccaggtggatggtggagctgagtgccttgtagaaatccgtagcatagtctcagagtcagatgtttcatcatttgaaatccaacatagtggatttgtgaagcagctgttgctttatttgacatctaaaagtgaaaaggatgctgtgagcagagagatcagattaaagcgatttcttcatgtatttttttcttctccacttcctggagaagagcccattggaagagtggaaccagtgggtaatgcacctttgttggcattagttcacaagatgaacaactgcctcagccagatggaacaatttccagtcaaagtacatgatttccctagtggaaatgggacaggaggcagcttttctctcaacagaggatcacaggctttaaaatttttcaacacacatcaattaaaatgccagttacaaaggcatccagactgtgcaaatgtgaagcagtggaagggtggacctgtcaagattgaccctctggctttggtacaagccatcgagagataccttgtagttagagggtatggaagagtaagagaagatgatgaagacagcgatgacgatggatcagatgaggaaatagatgagtctctggctgctcagttcctaaattcaggaaatgtaagacacaggctgcagttttatattggagaacatttgctgccgtataacatgactgtgtatcaggcagtacggcagtttagtatacaggctgaagatgaaagagaatccacagatgatgagagcaatcctctaggcagagctggtatttggacaaagactcatacaatatggtataaacctgtgagagaggatgaagaaagtaataaagattgtgttggtggtaaaagaggaagagcccaaacagctccaacgaaaacttcccctagaaatgcaaaaaagcatgatgagttatggcacgatggagtgtgcccatcagtatcaaatcctttagaagtttacctcattcccacaccacctgaaaatataacatttgaagacccgtcattagatgtgatccttcttttaagagttttacatgctatcagtcgatactggtattacttgtatgataatgcaatgtgcaaggaaattattccaactagtgaatttattaacagtaagttaacagcaaaagcaaataggcaacttcaagatcctttagtaatcatgacaggaaacatcccaacatggcttactgagctaggaaaaacctgcccatttttctttccttttgatacccggcaaatgcttttttatgtaactgcatttgatcgggaccgagcaatgcaaagattacttgataccaacccagaaatcaaccagtctgattctcaagatagcagagttgcacctagattggatagaaaaaaacgtactgtgaaccgagaggagctgctgaaacaggcggagtctgtgatgcaggacctcggcagctcacgggccatgttagaaatccagtatgaaaatgaggttggtacaggtcttgggcctacactggagttttatgcgcttgtatctcaggaactacagagagctgacttgggtctttggagaggtgaagaagtaactcttagcaatccaaaagggagccaagaagggaccaagtatattcaaaacctccagggcctgtttgcgcttccctttggtaggacagcaaagccagctcatatcgcaaaggttaagatgaagtttcgcttcttaggaaaattaatggccaaggctatcatggatttcagattggtggaccttccccttggcttacccttttataaatggatgctacggcaagaaacttcactgacatcacacgatttgtttgacatcgacccagttgtagccagatcagtttatcacctagaagacattgtcagacagaagaaaagacttgaacaagataaatcccagaccaaagagagtctacagtatgcattagaaaccttgactatgaatggctgctcagttgaagatctaggactggatttcactctgccagggtttcccaatatcgaactgaagaaaggagggaaggatataccagtcactatccacaatttagaggagtatctaagactggttatattctgggcactaaatgaaggcgtttctaggcaatttgattcgttcagagatggatttgaatcagtcttcccactcagtcatcttcagtacttctacccggaggaactggatcagctcctttgtggcagtaaagcagacacttgggatgcaaagacactgatggaatgctgtaggcctgatcatggttatactcatgacagtcgggctgtgaagtttttgtttgagattctcagtagttttgataatgagcagcagaggttatttctccagtttgtgactggtagcccaagattgcctgttggaggattccggagtttgaatccacctttgacaattgtccgaaagacgtttgaatcaacagaaaacccagatgacttcttgccctctgtaatgacttgtgtgaactatcttaagttgccggactattcaagcattgagataatgcgtgaaaaactgttgatagcagcaagagaagggcagcagtcgttccatctttcctgattatagcaagaaatgcagtgtctgcctgttacagcaaaagaaacaaatcatgatttcttttctaatgttatcacctgagtcaaggaaacatgttacgccttcttgttgtaggaaaaacggcttgcagattataaagagacatttggttgatattcattaatggccccatggacttaaagtgatcaggccctaaaacgttgttgtgatgaggtttctttagcaagttcttgtttaaattatcatttatttgatgagtgaagtttttaacatgctttgctgtgtgaaatttaaaaaagggatgtttttccaggctggaacaataaatgtggctgtgcagttt

SEQ ID NO: 281 - DNA, 1266 bp, Homo sapiens
gccggtcggagggctcctagtgcgccaggttgtgggaagtgaggctggcggtggcgacaaccgaggaggaggggcgggacggtggagcacggaccggctgagcgtcatggagggctcaggggagcagccgggcccacaaccacagcatcccggagaccaccgcatccgcgacggcgacttcgtggtgctgaaacgtgaagatgtgtttaaagcagtacaagtccagcggagaaaaaaagtaactttcgaaaaacagtggttctacctggataacgtcattggccatagttatggaactgcatttgaagtgaccagtggaggaagtctacagcccaagaagaagagggaagagcctactgcagagactaaagaagcgggcactgataatcgaaatatagttgatgatgggaaatctcagaaacttactcaagatgacataaaagctttgaaggacaagggcattaaaggagaggaaatagttcagcagttaattgaaaatagtacaacattccgagacaagacagaatttgcccaagataaatatattaaaaagaagaaaaaaaaatatgaagccatcattactgttgtgaagccatccacccgtattctttcaattatgtattatgcaagagaacctggaaaaattaaccacatgagatacgatacactagcccagatgttgacgttgggaaatatccgtgctggcaacaaaatgattgtgatggaaacgtgtgcaggcttggtgctgggtgcaatgatggaacgaatgggaggttttggctccattattcagctataccctggaggaggacctgttcgggcagcaacagcatgttttggatttcccaaatcttttctcagtggtctttatgaattccctctcaacaaagtggacagtcttctacatggaacattttctgccaagatgttatcttcagagccaaaagacagtgctttggttgaagaaagtaatggcacactggaggaaaaacaggcttctgggcaagagaatgaagacagcatggcagaggccccagagagcaaccacccagaagaccagggaaacaatggaaacaatttctcaagatccagaacataaggggcctaaagagagaggaagcaaaaaagattatatttcagggaaaaacagagggagacaaggaaggagcagcggaaaagacttttggggctgccgttttgcttgagttgaaaggaaacgccgatggttttatttgttagcttgttcttttccacccccattctcct

SEQ ID NO: 282 - DNA, 3962 bp, Homo sapiens
aggaattccggtgagctgagcgcggcgcgcggccgggccggggagcgggcgcgccggcggcctcagcatggaggacggcttctccagctacagcagcctgtacgacacgtcctcgctgctccagttctgcaacgatgacagcgcttctgctgcaagtagcatggaggtgacagaccgcattgcttcactggagcagagagtccagatgcaagaagacgacatccagctgctcaaatcagctctagctgatgtggttcggcggctgaacattactgaggaacagcaggccgtgcttaacaggaaaggacctaccaaagcaagaccactgatgcagaccctgccttttagatccacggtcaacaatggcactgtgttaccaaagatacctactggctctctaccatccccctccgggttcaggaaagatactgctgtgccagcaaccaaaagtaacatcaagaggaccagctcttctgaacgagtgtctcctgggggtcgaagggaaagcaatggggattccagaggaaaccggaatcgcacaggctccaccagcagctcttccagtggcaaaaaagaacagtgaaagcaaacccaaggagcctgtattcagtgcagaagaaggctatgtaaaattgtttcttcgtggacgccctgttaccatgtacatgcccaaagatcaagtggattcttacagcttggaagcaaaagtagaacttccaaccaagagactcaagctggaatgggtctatgggtacaggggtcgagactgccgtaacaacctgtacttgcttccgacgggagagaccgtctacttcatcgcatccgtggtggtgttatacaacgtggaggagcaactgcagaggcattacgctggccacaacgatgacgtgaagtgcctagcagttcatcctgatcggatcacgatagcaacaggacaagttgcgggcacatcgaaggatggaaaacaattgcccccacatgtgcgcatctgggattctgtgacattgaatactctccacgtcattggaataggtttttttgaccgagcagtcacctgtattgcattctcaaaatctaatggaggaaccaatctctgtgctgtggatgactccaacgaccatgtgctctctgtatgggactggcagaaagaagaaaaactagcagatgtgaagtgctctaatgaagctgtgtttgctgcggatttccaccccacggacaccaacatcatagttacttgtggagaaatcacatctctacttttggacactagaaggaagctcccattaataagaagcaaggattattcgagaacaagaaaagccaaagttgtcctctgtgtgactttctctgaaaacggtgacaccattactggagattcaagtggcaacatcttagtatggggaaaaggtacaaatcgaataagctatgcagttcagggggcccatgagggtggcatttctccactttgtatgttaagagatggcacactggtgtcgggaggtgggaaagaccgaaagctcatttcttggagcggaaactatcaaaaacttcgtaaaacggagattccagaacagtttggtccaatacggacagtggccgaggggaaaggcgatgtgatcttgattggcacaactcgaaactttgtcctgcagggcactctgtcaggggacttcacacccattactcagggtcacactgatgagctctggggactggccatccatgcctcaaaacctcagttcttgacctgtgggcatgacaagcatgccactctctgggacgctgtgggtcaccgtcccgtctgggacaaaataatagaggatccagctcagtcttctggttttcatccttcagggtctgtggttgcagtcggaacactcactgggaggtggtttgtgtttgacacagaaacaaaagacttggtcaccgttcacacagatggaaacgaacagctctctgtaatgcgatactcaccagatgggaatttcttagccataggctcacatgacaactgcatctatatatatggcgttagtgacaacgggaggaagtacacgcgagtgggcaagtgctcgggtcattccagcttcattactcacctggactggtctgtaaactcacagttcctcgtgtcaaattccggagactacgaaatcctctactgggttccctctgcctgtaagcaagtcgtaagtgtggaaactacaagagacattgaatgggctacctatacctgcactttgggattccatgtttttggagtgtggccagaaggctcggacggaaccgacatcaatgccgtctgtcgggcccatgagaagaaactcctgtcaacaggcgacgactttggcaaagtgcacctcttctcatacccctgctcgcagttcagggctccaagccacatctacggcgggcacagcagccatgtcaccaatgtcgatttcctctgtgaagacagccacctcatctccacgggcgggaaagacacaagcatcatgcagtggcgcgtcatttagtacccaccgagagctgtggggagcagcatgggcaaggaagacacagactcgcattacccttggtcactgtgatttctgttttgtttaaaaaattcttacaaacctcaggaaaactgtgccctccgccggctaccttagcttagcgtgtcagcgggcgccacagcggaatcagcggttccgtgttcacttttgttgtacaatatatgacacagtgcacattgaataccaacaaggttgcaacgtttacattatagccacatcaacagaagtaactgggtatattcttagtaacttttctatggaactcttcaaaaatgggtcacaggatggccttttaaaacattgtatattatcttcactgttttcaccttttaggttgctaagttcaatatttgtgatgataatgaggtactgaaccacgatggctgttgaggaattggtcctaaaaggacagatcacttcagaagagtgaataactgatttgcacagctgaatcaggagacacaaagatgagactgtgtttggttacattttccaaagtttcattgcattctcccttggggaggctgtgagagagggcttgtatccctcttgtgctaagcagactctactcctaactgacttcaatatttcagcagggtacacaggcgtttccaagtttcagtgacaccgtcctgcctaaccagatgcggtcagcctcttcacacccacctggcttgcatcccccatcccttgttcacacgccctgattcacggtgagacattttgccaccttcttgtgtatattacttggcatgagatgatattgtacttgtataggattctagcaattcataataaatatgtaagactaggctttactgtcttatgcttatggacattgtatatttgtattttatgaccaagtagaccaagtcagaaagatctctctcgagcgcaccataaacctgcagagagaagtctcgaaaggctccaccaaggtaccaagggcagctgcttttcctgtcttttgtgcatgggcgacccattacagtatgagataagattgagttctgatgcgttaaacggaggtggcagaaatttgtcaagaaggccttatccatttcgattgtgtgacagattgaaatttattgtttacattggggaatgtatctcaaatttttaaatagaagagtaataaacagactttaaagcaaatattaagatttttactcattcaaggcaagtaaatgaatggaattatctgagctctatggcactggttgtttagagtgactgatgaagtgcacctttcaaaaacatttttgatgccatcaccagcctactgcagaagtgcagggcacagtaaacaccatgtattattgaagatgatctgttttgtatgtatccttgtcaaatatattctataatggaataaaaaatcctggaaagtgggggtttccttaa

SEQ ID NO: 283 - DNA, 1687 bp, Homo sapiens
atggatggattttatgaccagcaagtgccttacatggtcaccaatagtcagcgtgggagaaattgtaacgagaaaccaacaaatgtcaggaaaagaaaattcattaacagagatctggctcatgattcagaagaactctttcaagatctaagtcaattacaggaaacatggcttgcagaagctcaggtacctgacaatgatgagcagtttgtaccagactatcaggctgaaagtttggcttttcatggcctgccactgaaaatcaagaaagaaccccacagtccatgttcagaaatcagctctgcctgcagtcaagaacagccctttaaattcagctatggagaaaagtccctgtacaatgtcagtgcctatgatcagaacccacaagtgggaatgaggccctccaacccccccacaccatccagcacgccagtgtccccactgcatcatgcatctccaaactcaactcatacaccgaaacctgaccgggccttcccagctcacctccctccatcgcagtccataccagatagcagctaccccatggaccacagatttcgccgccagctttctgaaccctgtaactcctttcctcctttgccgacgatgccaagggaaggacgtcctatgtaccaacgccagatgtctgagccaaacatccccttcccaccacaaggctttaagcaggagtaccacgacccagtgtatgaacacaacaccatggttggcagtgcggccagccaaagctttccccctcctctgatgattaaacaggaacccagagattttgcatatgactcagaagtgcctagctgccactccatttatatgaggcaagaaggcttcctggctcatcccagcagaacagaaggctgtatgtttgaaaagggccccaggcagttttatgatgacacctgtgttgtcccagaaaaattcgatggagacatcaaacaagagccaggaatgtatcgggaaggacccacataccaacggcgaggatcacttcagctctggcagtttttggtagctcttctggatgacccttcaaattctcattttattgcctggactggtcgaggcatggaatttaaactgattgagcctgaagaggtggcccgacgttggggcattcagaaaaacaggccagctatgaactatgataaacttagccgttcactccgctattactatgagaaaggaattatgcaaaaggtggctggagagagatatgtctacaagtttgtgtgtgatccagaagcccttttctccatggcctttccagataatcagcgtccactgctgaagacagacatggaacgtcacatcaacgaggaggacacagtgcctctttctcactttgatgagagcatggcctacatgccggaagggggctgctgcaacccccacccctacaacgaaggctacgtgtattaacacaagtgacagtcaagcagggcgttttttgcgcttttccttttttctgcaagatacagagaattgctgaatctttgttttatttctgttgttgatatttatttttaaataataatacacaaaaaggggcttttcctgttgcattattctatggtctgccatggactgtgcactttatttgagggtgggtgggagtaatctaaacatttattctgtgtaacaggaagctaatgggtgaatgggcagagggatt

SEQ ID NO: 284 - DNA, 3787 bp, Homo sapiens
gcggccgctcggcggccgggggtcccttcggtggggccgcggctccccgcccgccgcccccgcgcgtccattcgctttgtgtcccgcgcgcggccgggccccccgcgcactctcagccctgcgccccgcggcccggcgggcggctcccggcgcggccccagcagcccgcgccggcattgtgtggacgcgcccggccgcgagcgcgcgcgcgggccctgccgagcgcccccggccccgtccgctccggccgcggcgcccgcgcccgccgcccccgccgccctcgccgcgcggcccccggcccggcccggcccgacccgggcagcgcagcggcggggcgagcggcggcgcggcaacatggcgacggtgcccgtgtactgcgtctgccggctgccctacgacgttacccgctttatgatcgagtgcgatgcctgcaaggactggttccacggcagctgtgttggggtggaagaggaagaggcaccagacatcgacatttaccactgcccgaactgcgagaaaacccatggcaagtccacactcaagaaaaagcggacttggcacaaacacggccctgggccaacaccggacgtgaaaccagtgcagaatggcagtcagctgttcatcaaggagctgcggagccgaaccttccccagtgctgaagacgtggtgtcccgtgtgccaggtagccagctcaccgtgggctacatggaggagcatggcttcactgagcccatccttgtccccaagaaagatggcctgggcttagctgtccctgccccaacattctacgtgagtgacgtcgagaactacgtggggccggaacggagtgtggatgtgacagatgtcaccaagcagaaggactgcaagatgaagctgaaggagtttgtggactattactacagcaccaaccgcaagcgggtcctcaacgtcaccaacctcgagttctctgacacccgaatgtccagcttcgtggagccacctgacattgtaaagaaactgtcatgggtagaaaactactggccagatgatgcattgctggccaagcccaaagtgaccaagtactgcctaatctgcgtgaaggacagttacaccgacttccacatcgactctgggggcgcctctgcctggtaccacgtgctcaagggggagaagaccttctatctcatcaggccggcctcggccaacatctccctgtatgagcgctggcggtctgcctctaaccacagcgagatgttctttgctgaccaggtcgacaaatgctacaagtgcatcgtcaagcagggccagaccctcttcatcccctcaggctggatctacgccacactcacccctgtggactgcctggccttcgcgggacatttcctccacagcctgagtgtggagatgcagatgagagcatacgaggtggaaaggaggttgaaacttggcagcctgactcagtttcccaactttgaaactgcgtgctggtacatgggaaagcacctattggaggcgttcaaaggttctcacaagtctgggaagcagctgcccccacatctagtccaaggagctaaaattctcaatggtgctttccgatcgtggacgaagaagcaggctttggcagagcatgaggacgagctcccggagcacttcaaaccttcacagctaatcaaggacctggccaaagagatccggctcagtgagaatgcctccaaagccgtccgaccggaagtgaatactgtcgcctcgtcagatgaggtgtgtgacggggaccgggagaaggaggagcccccgtctcccattgaggccaccccgcctcaatccctcctggagaaagtgtccaaaaaaaagactcccaaaactgtgaagatgcccaagccatccaaaatccccaagcccccgaagccccctaagcccccaaggccccccaaaacgctgaagctcaaagatggaggcaagaagaaagggaagaagtcccgggagtcagcctcacccaccatccccaacctggacctgctcgaagcccacaccaaggaggcactgaccaagatggagccgcccaagaagggcaaggccacaaagagtgtcctgagtgtgcccaacaaagatgtggttcacatgcagaatgatgtggagaggctggaaattcgagagcaaacaaagagcaagtcagaagccaagtggaaatacaagaacagcaaacctgactcgttactgaagatggaggaggagcagaggctggagaagtcgcccctggctgggaacaaggacaagttttccttttctttctccaacagaaaactcctgggctccaaggccctcaggcccccgagcagccctggtgtgttcggcgccttgcagagcttcaaggaggacaaggccaagcccgtgcgcgatgagtatgagtacgtatcagatgatggggagctgaagatagacgagtttcccatcaggaggaagaagagcgcccccaaaagggacttgtccttcttgttagacaagaaggaggctctcctcatgcccacctcgaagccaaagctggattctgcggtgtacaagagcgatgactcctctgacgagggctctctgcacatcgacacggacaccaagccaggcagaaatgccaaagtgaagaaggagagtgggagctccgcggccggcatcctggacctgctgcaggccagcgaggaggttggcgcactcgagtacaaccccaacagccagccccctgcctcccccagcacacaggaagccattcagggaatgctctccatggccaatctgcaggcctctgactcttgcctgcagaccacatggggcacggggcaggccaagggtggctcactggcagcccatggtgcccggaagattggtggtggcaacaaaggcacaggcaagcgcctgctgaagaggactgccaagaacagtgtggatctggaggactacgaggagcaggatcacctggatgcctgcttcaaggactcagactatgtttacccctcactggagtctgacgaagataaccccgtcttcaagtcccggtcaaagaagaggaaaggctcagacgatgctccgtacagccccacagccagggtcggtccatcggtgccaagacaagacaggcctgtgcgtgaggggaccagagtggcctccattgagacggggctggcagctgctgcagccaagctgtcccagcaggaggagcagaaaaacaggaagaagaagaacaccaaaaggaagccggctcctaacactgcctccccctccatctccacctctgcctccgcctccacgggtaccacctcggcctccaccaccccagcatccaccaccccggcctccaccaccccagcatccaccaccccggcctccaccagcacagccagcagccaggcctcacaggagggcagctcacctgagcccccacctgaatcacacagcagtagcctggctgaccacgaatatacagcagccggcacattctcggggtcccaggctggccgtgcctcccagcccatggcccctggagtctttctcacacagaggcggccttctgcatcatcccccaacaacactgctgccaaaggaaaacgtacaaaaaagggcatggccaccgccaagcaaaggcttggaaagatcttgaagatccatcggaatgggaaactgctcctctaaggcttggaaagccaggatccttctgatatgctaaggacccccggagccccgctacatcagcccctcccaggacggtggctgtgccgcctggcccggggagggcttgcttcattccgaccaattttccaatcaa

SEQ ID NO: 285 - DNA, 3886 bp, Homo sapiens
aggagagaagaaattgaaaagcaggcacttgagaagtctaagagaagctctaagacgtttaaggaaatgctgcaggacagggaatcccaaaatcaaaagtctacagttccgtcaagaaggagaatgtattcttttgatgatgtgctggaggaaggaaagcgaccccctacaatgactgtgtcagaagcaagttaccagagtgagagagtagaagagaagggagcaacttatccttcagaaattcccaaagaagattctaccacttttgcaaaaagagaggacccgtgtaacaactgaaattcagcttccttctcaaagtcctgtggaagaacaaagcccagcctctttgtcttctctgcgttcacggagcacacaaatggaatcaacttgtgtttcagcttctctccccagaagttaccggaaaactgatacagtcaggttaacatctgtggtcacaccaagaccctttggctctcagacaaggggaatctcatcactccccagatcttacacgatggatgatgcttggaagtataatggagatattgaagacattaagagaactccaaacaatgtggtcagcacccctgcaccaagcccggacgcaagccaactggcttcaagcttatctagccagaaagaggtagcagcaacagaagaagatgtgacaaggctgccctctcctacatcccccttctcatctctttcccaagaccaggctgccacttctaaagccacattgtcttccacatctggtcttgatttaatgtctgaatctggagaaggggaaatctccccacaaagagaagtctcaagatcccaggatcagttcagtgatatgagaatcagcataaaccagacgcctgggaagagtcttgactttgggtttacaataaaatgggatattcctgggatcttcgtagcatcagttgaagcaggtagcccagcagaattttctcagctacaagtagatgatgaaattattgctattaacaacaccaagttttcatataacgattcaaaagagtgggaggaagccatggctaaggctcaagaaactggacacctagtgatggatgtgaggcgctatggaaaggctggttcacctgaaacaaagtggattgatgcaacttctggaatttacaactcagaaaaatcttcaaatctatctgtaacaactgatttctccgaaagccttcagagttctaatattgaatccaaagaaatcaatggaattcatgatgaaagcaatgcttttgaatcaaaagcatctgaatccatttctttgaaaaacttaaaaaggcgatcacaattttttgaacaaggaagctctgattcggtggttcctgatcttccagttccaaccatcagtgccccgagtcgctgggtgtgggatcaagaggaggagcggaagcggcaggagaggtggcagaaggagcaggaccgcctactgcaggaaaaatatcaacgtgagcaggagaaactgagggaagagtggcaaagggccaaacaggaggcagagagagagaattccaagtacttggatgaggaactgatggtcctaagctcaaacagcatgtctctgaccacacgggagccctctcttgccacctgggaagctacctggagtgaagggtccaagtcttcagacagagaaggaacccgagcaggagaagaggagaggagacagccacaagaggaagttgttcatgaggaccaaggaaagaagccgcaggatcagcttgttattgagagagagaggaaatgggagcaacagcttcaggaagagcaagagcaaaagcggcttcaggctgaggctgaggagcagaagcgtcctgcggaggagcagaagcgccaggcagagatagagcgggaaacatcagtcagaatataccagtacaggaggcctgttgattcctatgatataccaaagacagaagaagcatcttcaggttttcttcctggtgacaggaataaatccagatctactactgaactggatgattactccacaaataaaaatggaaacaataaatatttagaccaaattgggaacacgacctcttcacagaggagatccaagaaagaacaagtaccatcaggagcagaattggagaggcaacaaatccttcaggaaatgaggaagagaacaccccttcacaatgacaacagctggatccgacagcgcagtgccagtgtcaacaaagagcctgttagtcttcctgggatcatgagaagaggcgaatctttagataacctggactccccccgatccaattcttggagacagcctccttggctcaatcagcccacaggattctatgcttcttcctctgtgcaagactttagtcgcccaccacctcagctggtgtccacatcaaaccgtgcctacatgcggaacccctcctccagcgtgcccccaccttcagctggctccgtgaagacctccaccacaggtgtggccaccacacagtcccccaccccgagaagccattccccttcagcttcacagtcaggctctcagctgcgtaacaggtcagtcagtgggaagcgcatatgctcctactgcaataacattctgggcaaaggagccgccatgatcatcgagtccctgggtctttgttatcatttgcattgttttaagtgtgttgcctgtgagtgtgacctcggaggctcttcctcaggagctgaagtcaggatcagaaaccaccaactgtactgcaacgactgctatctcagattcaaatctggacggccaaccgccatgtgatgtaagcctccatacgaaagcactgttgcagatagaagaagaggtggttgctgctcatgtagatctataaatatgtgttgtatgtcttttttgctttttttttaaaaaaaagaataactttttttgcctctttagattacatagaagcattgtagtcttggtagaaccagtatttttgttgtttatttataaggtaattgtgtgtggggaaaagtgcagtatttacctgttgaattcagcatcttgagagcacaagggaaaaaataagaacctacgaatatttttgaggcagataatgatctagtttgactttctagttagtggtgttttgaagagggtattttattgttttttaaaaaaaggttcttaaacattatttgaaatagttaatataaatacataattgcatttgctctgtttattgtaatgtattctaaattaatgcagaaccatatggaaaatttcattaaaatctatccccaaatgtgctttctgtatccttccttctacctattattctgatttttaaaaatgcagttaatgtaccatttatttgcttgatgaagggagctctattttctttaccagaaatgttgctaagtaattcccaatagaaagctgcttattttcattaatgaaaaataaccatggtttgtatactagaagtcttcttcagaaactggtgagcctttctgttcaattgcatttgtaaataaacttgctgatgcatttaacgagtgggtcgtctttttcttaggtgtatgtgtctgacctcaggccttttagccatatttcagtatgtggccttttttgatgttatgttttatccagtagctttactaaggtataattgatgtaataaactgcatatatttaaagtgtatactttgacaaattttgacatggtgtataccttcgaaactatgccacagtctggatgtgtttactgaaacattttaataaggaagtttatttttgataaagttatgtttttggatacaatatatttgtatggtgagagtgatgaattgttggatcatttgaataaaatcttttactaaccccatgataaaaggagaagacaacagtgagcttagaatatctataaagcaaaaa

SEQ ID NO: 286 - DNA, 3198 bp, Homo sapiens
aacctgaatatccaggtggaggacattcggattcgagccatcctctcaacctaccgcaagcgcaccccagtgatggagggctacgtggaggtgaaggagggcaagacctggaagcagatctgtgacaagcactggacggccaagaattcccgcgtggtctgcggcatgtttggcttccctggggagaggacatacaataccaaagtgtacaaaatgtttgcctcacggaggaagcagcgctactggccattctccatggactgcaccggcacagaggcccacatctccagctgcaagctgggcccccaggtgtcactggaccccatgaagaatgtcacctgcgagaatgggcagccggccgtggtgagttgtgtgcctgggcaggtcttcagccctgacggaccctcgagattccggaaagcatacaagccagagcaacccctggtgcgactgagaggcggtgcctacatcggggagggccgcgtggaggtgctcaaaaatggagagtgggggaccgtctgcgacgacaagtgggacctggtgtcggccagtgtggtctgcagagagctgggctttgggagtgccaaagaggcagtcactggctcccgactggggcaagggatcggacccatccacctcaacgagatccagtgcacaggcaatgagaagtccattatagactgcaagttcaatgccgagtctcagggctgcaaccacgaggaggatgctggtgtgagatgcaacacccctgccatgggcttgcagaagaagctgcgcctgaacggcggccgcaatccctacgagggccgagtggaggtgctggtggagagaaacgggtcccttgtgtgggggatggtgtgtggccaaaactggggcatcgtggaggccatggtggtctgccgccagctgggcctgggattcgccagcaacgccttccaggagacctggtattggcacggagatgtcaacagcaacaaagtggtcatgagtggagtgaagtgctcgggaacggagctgtccctggcgcactgccgccacgacggggaggacgtggcctgcccccagggcggagtgcagtacggggccggagttgcctgctcagaaaccgcccctgacctggtcctcaatgcggagatggtgcagcagaccacctacctggaggaccggcccatgttcatgctgcagtgtgccatggaggagaactgcctctcggcctcagccgcgcagaccgaccccaccacgggctaccgccggctcctgcgcttctcctcccagatccacaacaatggccagtccgacttccggcccaagaacggccgccacgcgtggatctggcacgactgtcacaggcactaccacagcatggaggtgttcacccactatgacctgctgaacctcaatggcaccaaggtggcagagggccaaaaggccagcttctgcttggaggacacagaatgtgaaggagacatccagaagaattacgagtgtgccaacttcggcgatcagggcatcaccatgggctgctgggacatgtaccgccatgacatcgactgccagtgggttgacatcactgacgtgccccctggagactacctgttccaggttgttattaaccccaacttcgaggttgcagaatccgattactccaacaacatcatgaaatgcaggagccgctatgacggccaccgcatctggatgtacaactcccacataggtggttccttcagcgaagagacggaaaaaaagtttgagcacttcagcgggctcttaaacaaccagctgtccccgccagtaaagaagcctgcgtggtcaactcctgtcttcaggccacaccacatcttccatgggacttctccccaacaactgagtctgaacgaatgccacgtgccctcacccagcccggcccccaccctgtccagacccctacagctgtgtctaagctcaggaggaaagggaccctcccatcattcatggggggctgctacctgacccttggggcctgagaaggccttgcgggggtggggtttgtccacagagctgctggagcagcaccaagagccagtcttgaccgggatgaggcccacagacaggttgtcatcagcttgtcccattcaagccaccgagctcaccacagacacagtggagccgcgctcttctccagtgacacgtggacaaatgcgggctcatcagcccccccagagagggtcaggccgaaccccatttctcctcctcttacctcattttcagcaaacttgaatatctagacctctcttccaatgaaaccctccagtctattatagtcacatagataatggtgccacgtgttttctgatttggtgagctcagacttggtgcttccctatccacagcccccaccccttgtttttcaagatactattattatattttcacagacttttgaagcacaaatttattggcatttaatattggacatctgggcccttggaagtacaaatctaaggaaaaaccaacccactgtgtaagtgactcatcttcctgttgttccaattctgtgggtttttgattcaacggtgctataaccagggtcctgggtgacagggagatacatgagcaccatgtgtcatcacagacacttacacatacttgaaacttggaataaaagaaagatttatgaaacgtgtctgtgtttcctttgacccacagcacctgggccctgagcagcaggcttcctatgttcagtggccagaagcagagcttcaggtacattcgtggttttctccggtggacatgggtcctcagatcccctccagcccagtgtggccaccagggcacctccttcaatagactccaaaaggggcagctcctaccatctgggagaagcaatctaaggagatcacaaaaagtaacggaacaggagtcataatctttcttgaactcctgtggtttttactgaaacttgtcagaaggcataggagttgtgcgagggctggatgggaagtctagatttaaacagccaccaggcagcttatcaaagcaagagggcatccgttcacaggacaggggctcccagcaattcccagtggcagtggggggtggctggcccaagccccaagtcacccagacacaggggacttccccttgtgtcaacagcatgctagggcccagcaaactagagggtaggtaggaccaccttggcaccaactccactcaaaccac

SEQ ID NO: 287 - DNA, 4231 bp, Homo sapiens
ggacaggcgtggcggccggagccccagcatccctgcttgaggtccaggagcggagcccgcggccaccgccgcctgatcagcgcgaccccggcccgcgcccgccccgcccggcaagatgctgcccgtgtaccaggaggtgaagcccaacccgctgcaggacgcgaacatctgctcacgcgtgttcttctggtggctcaatcccttgtttaaaattggccataaacggagattagaggaagatgatatgtattcagtgctgccagaagaccgctcacagcaccttggagaggagttgcaagggttctgggataaagaagttttaagagctgagaatgacgcacagaagccttctttaacaagagcaatcataaagtgttactggaaatcttatttagttttgggaatttttacgttaattgaggaaagtgccaaagtaatccagcccatatttttgggaaaaattattaattattttgaaaattatgatcccatggattctgtggctttgaacacagcgtacgcctatgccacggtgctgactttttgcacgctcattttggctatactgcatcacttatatttttatcacgttcagtgtgctgggatgaggttacgagtagccatgtgccatatgatttatcggaaggcacttcgtcttagtaacatggccatggggaagacaaccacaggccagatagtcaatctgctgtccaatgatgtgaacaagtttgatcaggtgacagtgttcttacacttcctgtgggcaggaccactgcaggcgatcgcagtgactgccctactctggatggagataggaatatcgtgccttgctgggatggcagttctaatcattctcctgcccttgcaaagctgttttgggaagttgttctcatcactgaggagtaaaactgcaactttcacggatgccaggatcaggaccatgaatgaagttataactggtataaggataataaaaatgtacgcctgggaaaagtcattttcaaatcttattaccaatttgagaaagaaggagatttccaagattctgagaagttcctgcctcagggggatgaatttggcttcgtttttcagtgcaagcaaaatcatcgtgtttgtgaccttcaccacctacgtgctcctcggcagtgtgatcacagccagccgcgtgttcgtggcagtgacgctgtatggggctgtgcggctgacggttaccctcttcttcccctcagccattgagagggtgtcagaggcaatcgtcagcatccgaagaatccagacctttttgctacttgatgagatatcacagcgcaaccgtcagctgccgtcagatggtaaaaagatggtgcatgtgcaggattttactgctttttgggataaggcatcagagaccccaactctacaaggcctttcctttactgtcagacctggcgaattgttagctgtggtcggccccgtgggagcagggaagtcatcactgttaagtgccgtgctcggggaattggccccaagtcacgggctggtcagcgtgcatggaagaattgcctatgtgtctcagcagccctgggtgttctcgggaactctgaggagtaatattttatttgggaagaaatatgaaaaggaacgatatgaaaaagtcataaaggcttgtgctctgaaaaaggatttacagctgttggaggatggtgatctgactgtgataggagatcggggaaccacgctgagtggagggcagaaagcacgggtaaaccttgcaagagcagtgtatcaagatgctgacatctatctcctggacgatcctctcagtgcagtagatgcggaagttagcagacacttgttcgaactgtgtatttgtcaaattttgcatgagaagatcacaattttagtgactcatcagttgcagtacctcaaagctgcaagtcagattctgatattgaaagatggtaaaatggtgcagaaggggacttacactgagttcctaaaatctggtatagattttggctcccttttaaagaaggataatgaggaaagtgaacaacctccagttccaggaactcccacactaaggaatcgtaccttctcagagtcttcggtttggtctcaacaatcttctagaccctccttgaaagatggtgctctggagagccaagatacagagaatgtcccagttacactatcagaggagaaccgttctgaaggaaaagttggttttcaggcctataagaattacttcagagctggtgctcactggattgtcttcattttccttattctcctaaacactgcagctcaggttgcctatgtgcttcaagattggtggctttcatactgggcaaacaaacaaagtatgctaaatgtcactgtaaatggaggaggaaatgtaaccgagaagctagatcttaactggtacttaggaatttattcaggtttaactgtagctaccgttctttttggcatagcaagatctctattggtattctacgtccttgttaactcttcacaaactttgcacaacaaaatgtttgagtcaattctgaaagctccggtattattctttgatagaaatccaataggaagaattttaaatcgtttctccaaagacattggacacttggatgatttgctgccgctgacgtttttagatttcatccagacattgctacaagtggttggtgtggtctctgtggctgtggccgtgattccttggatcgcaatacccttggttccccttggaatcattttcatttttcttcggcgatattttttggaaacgtcaagagatgtgaagcgcctggaatctacaactcggagtccagtgttttcccacttgtcatcttctctccaggggctctggaccatccgggcatacaaagcagaagagaggtgtcaggaactgtttgatgcacaccaggatttacattcagaggcttggttcttgtttttgacaacgtcccgctggttcgccgtccgtctggatgccatctgtgccatgtttgtcatcatcgttgcctttgggtccctgattctggcaaaaactctggatgccgggcaggttggtttggcactgtcctatgccctcacgctcatggggatgtttcagtggtgtgttcgacaaagtgctgaagttgagaatatgatgatctcagtagaaagggtcattgaatacacagaccttgaaaaagaagcaccttgggaatatcagaaacgcccaccaccagcctggccccatgaaggagtgataatctttgacaatgtgaacttcatgtacagtccaggtgggcctctggtactgaagcatctgacagcactcattaaatcacaagaaaaggttggcattgtgggaagaaccggagctggaaaaagttccctcatctcagccctttttagattgtcagaacccgaaggtaaaatttggattgataagatcttgacaactgaaattggacttcacgatttaaggaagaaaatgtcaatcatacctcaggaacctgttttgttcactggaacaatgaggaaaaacctggatccctttaaggagcacacggatgaggaactgtggaatgccttacaagaggtacaacttaaagaaaccattgaagatcttcctggtaaaatggatactgaattagcagaatcaggatccaattttagtgttggacaaagacaactggtgtgccttgccagggcaattctcaggaaaaatcagatattgattattgatgaagcgacggcaaatgtggatccaagaactgatgagttaatacaaaaaaaaatccgggagaaatttgcccactgcaccgtgctaaccattgcacacagattgaacaccattattgacagcgacaagataatggttttagattcaggaagactgaaagaatatgatgagccgtatgttttgctgcaaaataaagagagcctattttacaagatggtgcaacaactgggcaaggcagaagccgctgccctcactgaaacagcaaaacaggtatacttcaaaagaaattatccacatattggtcacactgaccacatggttacaaacacttccaatggacagccctcgaccttaactattttcgagacagcactgtgaatccaaccaaaatgtcaagtccgttccgaaggcattttccactagtttttggactatgtaaaccacattgtacttttttttactttggcaacaaatatttatacatacaagatgctagttcatttgaatatttctccc

SEQ ID NO: 288 - DNA, 4337 bp, Homo sapiens
ggctgtgacactaatacttaacatggtggttgtgtctctttatgcctgactcaatcagttgaaatccaaaagtaagttcttccttgatttacctgccaagacctgagttcaggccctcagggtgctgaggttttcctttgtgggagaaaatgccaccagatggcgggttaggattgcagctccgttgaaggcgcggcccccgctcccgaacccccggcgaccaccccgtaacaacccccccacatcgggaataacacaccggagacttttggggggaaactaggtcgatggtcggcggcgccggatgggcagctgaggattgcctttgaggttattttaaaagttttgagttgtacagcacttgattattttgctgcattgtgaaaggacctctccagcaatgattacttcagaattaccagtgttacaggattcaactaatgaaactactgcccattccgatgctggcagcgagcttgaagaaacagaggtcaaaggaaaaagaaaaaggggtcgtcctggccggcctccatctacaaataagaaacctcgaaaatctccaggtgagaagagcagaattgaagctggaattagaggagcaggccgtggaagagctaatggacaccctcaacagaatggggaaggggagcctgtcacattatttgaggtggtgaaactggggaaaagtgcaatgcagtccgtggtggatgactggattgaatcatataaacaagacagggacatcgcacttctggatttaatcaacttttttatccagtgttcaggatgtcgaggtactgtgagaatagagatgtttcgaaatatgcagaatgcagaaatcatcagaaaaatgactgaagaatttgatgaggacagtggtgattatcctcttaccatgcctggacctcagtggaaaaaatttcgttcaaacttttgtgaatttattggagtcctgattcgacagtgtcagtatagcataatttatgatgagtatatgatggacacagtaatctcccttttgacgggtttgtcagactcccaggtcagagcttttaggcatacaagtaccctggctgccatgaagctcatgactgctctggtgaatgttgccttaaacctcagtattcatcaggataatacccagagacaatatgaagccgagagaaataaaatgattgggaagagagccaatgaaaggttggagttactacttcagaaacgcaaagagctgcaagaaaatcaggatgaaatcgaaaatatgatgaactctatttttaagggtatatttgttcatagataccgtgatgctattgctgagattagagccatttgtattgaagaaattggagtatggatgaaaatgtatagtgatgccttcctaaatgacagttacctaaaatatgttggctggactcttcatgacaggcaaggggaagtcaggctgaagtgtttgaaagctctgcagagtctatataccaatagagaattattccccaaattggaactattcactaaccgattcaaggatcgcattgtatcaatgacacttgataaagaatatgatgttgctgtggaagctattcgattggttactctgatacttcatggaagtgaagaagctctttccaatgaagactgtgaaaatgtttaccacttggtgtactcggcacatcgccctgttgctgtggcagctggagagttccttcacaaaaagctatttagcagacatgacccacaagcagaagaagcattagcaaagaggaggggaagaaacagcccgaatggaaacctcattaggatgctggttcttttctttcttgaaagtgagttacatgaacatgcagcctacttggtggacagtttatgggagagctctcaagaactgttgaaagactgggaatgtatgacagagttgctattagaagaacctgttcaaggagaggaagcaatgtctgatcgtcaagagagtgctcttatagagctaatggtttgtacaattcgtcaagctgctgaggcacatcctccagtgggaaggggtaccggcaagagagtgctaactgccaaagaaaggaaaactcaaattgatgatagaaacaaattgactgaacattttattattacacttcctatgttactgtcaaagtattctgcagatgcagagaaggtagcaaacttgctacaaatcccacagtattttgatttagaaatctacagcacaggtagaatggaaaagcatctggatgctttattaaaacagattaagtttgttgtggagaaacacgtagaatcagatgttctagaagcctgcagtaaaacctatagtatcttatgcaatgaagaatataccatccagaacagagttgacatagctcgaagccagctgattgatgagtttgtagatcgattcaatcattctgtggaagacctattgcaagagggagaagaagctgatgatgatgacatttacaatgttctttctacattaaagcggttaacttcttttcagaatgcacatgatctcacaaaatgggatctctttggtaattgctacagattattgaagactggaattgaacatggagccatgccagaacagatagtcgtgcaagcactgcagtgttcccattattcgattctttggcagttggtgaaaattactgatggctctccttccaaagaggatttgttggtattgaggaaaacggtgaaatcctttttggctgtttgccagcagtgcctgtctaatgttaatactccagtgaaagaacaggctttcatgttactctgtgatcttctgatgattttcagccaccaattaatgacaggtggcagagagggccttcagcctttggtgttcaatccagatactggactccaatctgaactcctcagttttgtgatggatcacgtttttattgaccaagacgaggagaaccagagcatggagggtgatgaagaagatgaagctaataaaattgaggccttacataaaagaaggaatctacttgctgctttcagcaaacttatcatttatgacattgttgacatgcatgcagctgcagacatcttcaaacactacatgaagtattacaatgactatggtgatattattaaggaaacactgagtaaaaccaggcagattgataaaattcagtgtgccaagactctcattctcagtttgcaacagttatttaatgaacttgttcaagagcaaggtcccaacctagataggacatctgcccatgtcagtggcattaaagaactggcacgtcgctttgcccttacatttggattggaccagattaagacacgagaagcagttgccacacttcacaaggatggcatagagtttgcatttaaataccaaaatcagaaaggacaagagtatccacctcctaatctggcttttcttgaagtactaagtgaattttcttctaaacttcttcgacaggacaaaaagacagttcattcatacctagagaaattccttaccgagcagatgatggaaaggagggaggatgtatggcttccactcatctcctatagaaattcattagtcactgggggtgaagatgatagaatgtctgtgaacagtggaagtagcagcagcaaaacctcatcagtaaggaataagaaaggacgacctccacttcataaaaaacgagtagaagatgagagtctggataacacatggctaaacaggactgacaccatgattcagactcctggccccctgccagcaccacaactcacatccactgtactgcgggagaacagtcggcccatgggagaccagattcaagaacctgagtctgaacatggttctgaaccagactttttacacaatcctcagatgcagatctcttggttaggccagccgaagttagaagacttaaatcggaaggacagaacaggaatgaactacatgaaagtgagaactggagtgaggcatgctgttcggggtctaatggaggaagatgctgagcccatctttgaagatgtgatgatgtcatcccgaagccagttagaagatatgaatgaagaatttgaggacaccatggttattgatctgcctccatcaagaaatcggcgagagagagctgagctaaggccagacttctttgactctgcagctatcatagaagatgattcaggatttggaatgcctatgttctgaagtctgaagaaaatttacaaatctggaactctattatttagagctagaggcctatatactgtgatagcttgtatggggaaaaacaacttttgatgtgatctgatttgttttttaatcaaatgattaaggtcaatccctttttgcagtgacagaagaggag

SEQ ID NO: 289 - DNA, 1090 bp, Homo sapiens
gctccgggagacttccggcagggcgggcgcggggtcttggcgaacggtcttcggaagcggcggcggcgcgatgaccacgctacgggcctttacctgcgacgacctgttccgcttcaacaacattaacttggatccacttacagaaacttatgggattcctttctacctacaatacctcgcccactggccagagtatttcattgttgcagaggcacctggtggagaattaatgggttatattatgggtaaagcagaaggctcagtagctagggaagaatggcacgggcacgtcacagctctgtctgttgccccagaatttcgacgccttggtttggctgctaaacttatggagttactagaggagatttcagaaagaaagggtggattttttgtggatctctttgtaagagtatctaaccaagttgcagttaacatgtacaagcagttgggctacagtgtatataggacggtcatagagtactattcggccagcaacggggagcctgatgaggacgcttatgatatgaggaaagcactttccagggatactgagaagaaatccatcataccattacctcatcctgtgaggcctgaagacattgaataaccctgggcagtggttcttaggcagatactctagatgctttatggacaatattattttcattggatgattctggagctctattaggagaaaagtaatcattttaggtcttaaagacttcaagaaaatacaggttatcaatttattttaaatctcattgtttccagttagcaatatcatacctattaaagctgttcattgtaacaaaattcaatcaaaaaggcagctaggtcagaaggaaacataccactctcatggttcatagtattcactgtatgtatgctagggaaaagacttgctccagtctcctcctcagttctgtgcctgagaaccactgctgcatatatttgtttttaaattttgtattgaactgttaattgaagctttaaaagcatatatgaaatgtataaatctaagatgtataatacattattgactctaaaaaaaaaaaaaaaaaaaaaaaaaaaaaaaaaaaaaaaaaaaaaa

SEQ ID NO: 290 - DNA, 2150 bp, Homo sapiens
ctcgagccacgaaggccccgctgtcctgtctagcagatacttgcacggtttacagaaattcggtccctgggtcgtgtcaggaaactggaaaaaaggtcataagcatgaagcgcagttcagtttccagcggtggtgctggccgcctctccatgcaggagttaagatcccaggatgtaaataaacaaggcctctatacccctcaaaccaaagagaaaccaacctttggaaagttgagtataaacaaaccgacatctgaaagaaaagtctcgctatttggcaaaagaactagtggacatggatcccggaatagtcaacttggtatattttccagttctgagaaaatcaaggacccgagaccacttaatgacaaagcattcattcagcagtgtattcgacaactctgtgagtttcttacagaaaatggttatgcacataatgtgtccatgaaatctctacaagctccctctgttaaagacttcctgaagatcttcacatttctttatggcttcctgtgcccctcatacgaacttcctgacacaaagtttgaagaagaggttccaagaatctttaaagaccttgggtatccttttgcactatccaaaagctccatgtacacagtgggggctcctcatacatggcctcacattgtggcagccttagtttggctaatagactgcatcaagatacatactgccatgaaagaaagctcacctttatttgatgatgggcagccttggggagaagaaactgaagatggaattatgcataataagttgtttttggactacaccataaaatgctatgagagttttatgagtggtgccgacagctttgatgagatgaatgcagagctgcagtcaaaactgaaggatttatttaatgtggatgcttttaagctggaatcattagaagcaaaaaacagagcattgaatgaacagattgcaagattggaacaagaaagagaaaaagaaccgaatcgtctagagtcgttgagaaaactgaaggcttccttacaaggagatgttcaaaagtatcaggcatacatgagcaatttggagtctcattcagccattcttgaccagaaattaaatggtctcaatgaggaaattgctagagtagaactagaatgtgaaacaataaaacaggagaacactcgactacagaatatcattgacaaccagaagtactcagttgcagacattgagcgaataaatcatgaaagaaatgaattgcagcagactattaataaattaaccaaggacctggaagctgaacaacagaagttgtggaatgaggagttaaaatatgccagaggcaaagaagcgattgaaacacaattagcagagtatcacaaattggctagaaaattaaaacttattcctaaaggtgctgagaattccaaaggttatgactttgaaattaagtttaatcccgaggctggtgccaactgccttgtcaaatacagggctcaagtttatgtacctcttaaggaactcctgaatgaaactgaagaagaaattaataaagccctaaataaaaaaatgggtttggaggatactttagaacaattgaatgcaatgataacagaaagcaagagaagtgtgagaactctgaaagaagaagttcaaaagctggatgatctttaccaacaaaaaattaaggaagcagaggaagaggatgaaaaatgtgccagtgagcttgagtccttggagaaacacaagcacctgctagaaagtactgttaaccaggggctcagtgaagctatgaatgaattagatgctgttcagcgggaataccaactagttgtgcaaaccacgactgaagaaagacgaaaagtgggaaataacttgcaacgtctgttagagatggttgctacacatgttgggtctgtagagaaacatcttgaggagcagattgctaaagttgatagagaatatgaagaatgcatgtcagaagatctctcggaaaatattaaagagattagagataagtatgagaagaaagctactctaattaagtcttctgaagaatgaagataaaatgttgatcatgtatatatatccatagtgaataaaattgtctcagtaaaaaaaaaaaaaaaaaaaaaaaaaaaaaaaaaaaaaaaaaaaaaaaaaaaaaaaaaaaaaaaa

SEQ ID NO: 291 - DNA, 3800 bp, Homo sapiens
gtcggaggcagaggcggcggcggcaggcggggagcaagaggcccaggcgactgcggcggctggggaaggagacaatgggccgggcctgcagggcccatctcgggagccaccgctggccgacaacttgtacgacgaagacgacgacgacgagggcgaggaggaggaagaggcggcggcggcggcgattgggtaccgagataaccttctgttcggtgatgaaattatcactaatggttttcattcctgtgaaagtgatgaggaggatagagcctcacatgcaagctctagtgactggactccaaggccacggataggtccatatacttttgttcagcaacatcttatgattggcacagatcctcgaacaattcttaaagatttattgccggaaacaatacctccacctgagttggatgatatgacactgtggcagattgttattaatatcctttcagaaccaccaaaaaggaaaaaaagaaaagatattaatacaattgaagatgccgtgaaattactgcaagagtgcaaaaaaattatagttctaactggagctggggtgtctgtttcatgtggaatacctgacttcaggtcaagggatggtatttatgctcgccttgctgtagacttcccagatcttccagatcctcaagcgatgtttgatattgaatatttcagaaaagatccaagaccattcttcaagtttgcaaaggaaatatatcctggacaattccagccatctctctgtcacaaattcatagccttgtcagataaggaaggaaaactacttcgcaactatacccagaacatagacacgctggaacaggttgcgggaatccaaaggataattcagtgtcatggttcctttgcaacagcatcttgcctgatttgtaaatacaaagttgactgtgaagctgtacgaggagatatttttaatcaggtagttcctcgatgtcctaggtgcccagctgatgaaccgcttgctatcatgaaaccagagattgtgttttttggtgaaaatttaccagaacagtttcatagagccatgaagtatgacaaagatgaagttgacctcctcattgttattgggtcttccctcaaagtaagaccagtagcactaattccaagttccataccccatgaagtgcctcagatattaattaatagagaacctttgcctcatctgcattttgatgtagagcttcttggagactgtgatgtcataattaatgaattgtgtcataggttaggtggtgaatatgccaaactttgctgtaaccctgtaaagctttcagaaattactgaaaaacctccacgaacacaaaaagaattggcttatttgtcagagttgccacccacacctcttcatgtttcagaagactcaagttcaccagaaagaacttcaccaccagattcttcagtgattgtcacacttttagaccaagcagctaagagtaatgatgatttagatgtgtctgaatcaaaaggttgtatggaagaaaaaccacaggaagtacaaacttctaggaatgttgaaagtattgctgaacagatggaaaatccggatttgaagaatgttggttctagtactggggagaaaaatgaaagaacttcagtggctggaacagtgagaaaatgctggcctaatagagtggcaaaggagcagattagtaggcggcttgatggtaatcagtatctgtttttgccaccaaatcgttacattttccatggcgctgaggtatattcagactctgaagatgacgtcttatcctctagttcttgtggcagtaacagtgatagtgggacatgccagagtccaagtttagaagaacccatggaggatgaaagtgaaattgaagaattctacaatggcttagaagatgagcctgatgttccagagagagctggaggagctggatttgggactgatggagatgatcaagaggcaattaatgaagctatatctgtgaaacaggaagtaacagacatgaactatccatcaaacaaatcatagtgtaataattgtgcaggtacaggaattgttccaccagcattaggaactttagcatgtcaaaatgaatgtttacttgtgaactcgatagagcaaggaaaccagaaaggtgtaatatttataggttggtaaaatagattgtttttcatggataatttttaacttcattatttctgtacttgtacaaactcaacactaacttttttttttttaaaaaaaaaaaggtactaagtatcttcaatcagctgttgggtcaagactaactttcttttaaaggttcatttgtatgataaattcatatgtgtatatataattttttttgttttgtctagtgagtttcaacatttttaaagttttcaaaaagccatcggaatgttaaattaatgtaaagggacagctaatctagaccaaagaatggtattttcacttttctttgtaacattgaatggtttgaagtactcaaaatctgttacgctaaacttttgattctttaacacaattatttttaaacactggcattttccaaaactgtggcagctaactttttaaaatctcaaatgacatgcagtgtgagtagaaggaagtcaacaatatgtggggagagcactcggttgtctttacttttaaaagtaatacttggtgctaagaatttcaggattattgtatttacgttcaaatgaagatggcttttgtacttcctgtggacatgtagtaatgtctatattggctcataaaactaacctgaaaaacaaataaatgctttggaaatgtttcagttgctttagaaacattagtgcctgcctggatccccttagttttgaaatatttgccattgttgtttaaatacctatcactgtggtagagcttgcattgatcttttccacaagtattaaactgccaaaatgtgaatatgcaaagcctttctgaatctataataatggtacttctactggggagagtgtaatattttggactgctgttttccattaatgaggagagcaacaggcccctgattatacagttccaaagtaataagatgttaattgtaattcagccagaaagtacatgtctcccattgggaggatttggtgttaaataccaaactgctagccctagtattatggagatgaacatgatgatgtaacttgtaatagcagaatagttaatgaatgaaactagttcttataatttatctttatttaaaagcttagcctgccttaaaactagagatcaactttctcagctgcaaaagcttctagtctttcaagaagttcatactttatgaaattgcacagtaagcatttatttttcagaccatttttgaacatcactcctaaattaataaagtattcctctgttgctttagtatttattacaataaaaagggtttgaaatatagctgttctttatgcataaaacacccagctaggaccattactgccagagaaaaaaatcgtattgaatggccatttccctacttataagatgtctcaatctgaatttatttggctacactaaagaatgcagtatatttagttttccatttgcatgatgtttgtgtgctatagatgatattttaaattgaaaagtttgttttaaattatttttacagtgaagactgttttcagctctttttatattgtacatagtcttttatgtaatttactggcatatgttttgtagactgtttaatgactggatatcttccttcaacttttgaaatacaaaaccagtgttttttacttgtacactgttttaaagtctattaaaattgtcatttgacttttttctg

SEQ ID NO: 292 - DNA, 1731 bp, Homo sapiens
gggggaggctgtgatgggttgacaggtgcgtgacagtgggagctgctctcggcacaagcatgtacggcaaaggcaagagtaacagcagcgccgtcccgtccgacagccaggcccgggagaagttagcactctacgtatatgaatatctgctccatgtaggagctcagaaatcagctcaaacatttttatcagagataagatgggaaaaaaacatcacattgggggaaccaccaggattcttacattcttggtggtgtgtattttgggatctctactgtgcagctccagagagacgtgaaacatgtgaacactcaagtgaagcaaaagccttccatgattacagtgctgcagcagctcccagtccagtgctaggaaacattcccccaggagatggcatgccagtaggtcctgtaccaccagggttctttcagccttttatgtcacctcggtaccctggaggtccaaggcccccattgaggatacctaatcaggcacttggaggtgtcccaggaagtcagccattactccccagaggaatggatccaactcgacaacaaggacatccaaatatgggtgggccaatgcagagaatgactcctccaagaggaatggtgcccttaggaccacagaactatggaggtgcaatgagacccccactgaatgctttaggtggccctggaatgcctggaatgaacatgggtccaggtggtggtagaccttggccaaacccaacaaatgccaattcaataccatactcctcagcatctcctgggaattatgtaggtcctccaggaggtggagggccaccaggaacacccatcatgcctagtccagcagattcaaccaactctggtgataacatgtatactttaatgaatgcagtacctcctggacctaacagacctaattttccaatgggccctgggtcagatggtcccatgggtggattaggaggaatggagtcacatcacatgaatggctctttaggctcaggagatatggacagtatttccaagaattctcccaataatatgagcctgagtaatcaaccgggcactccaagggatgatggcgaaatggggggaaatttcttaaatccttttcagagtgagagttactcccctagcatgacaatgagcgtgtgatccattaccaagtctcctcatgaaaaccacagtgagtcagcccttcacagaactactacggaagaaaattattcatcacagtgtacagttaaacaaaggaatctcagtcacaccaaaccaaccttttcatttcctgctctctcccctcttttgtgaagaaagcgggtccagatgtgattcaaacaactgtacggagtggcatattagaattgccctaaactgaactgcaaataattatgtgtgtatgtatatgtgtgggaaagagaatgtactgtatatgtgtatgttatacagacatatacacatacatacattgacccacaggacattgtaaaatattatcacatgacatcttaagtagaaataagtagggacttttattccatcctttttttcacgtttacattttaattattacaagttgctcctgccccctccctgaactattttgtgctgtgtatatcactgctttatataagttattttttaaggtgaactcagatgttatggttttgtatatgtctgcaatcatggataggaataaaatcgcttatttgagagctttcaaaaaaaaaaaaaaaaaaac

SEQ ID NO: 293 - DNA, 3416 bp, Homo sapiens
ggtttacacgtacctccgcctcatcgtggaccaccatgggactgcccagctccaggccctgcgacagaaggaagtagacttctgcatctcactgcttcgggaacggttcatggaatgtctgatgattggtcgggatctcgtaagactacttcagaatgttgctaggataccagaatttgaactgctttggaaagatattatccataatcctcaggccttgagtcctcagttcacaggtatcctacagcttcttcagtcaagaacatcccgaaaattcctagcatgtcgtctaaccccggacatggagactaaactcctcttcatgacatcccgggtgcgatttggtcaacaaaagcgataccaagattggttccagcgccagtacctgtcaactccagatagtcagtctctgcgctgtgacctcattcgctacatctgtggggtagtccacccttctaatgaagtactgagttcagatatcttgccccggtgggccatcattggttggctcctgacaacgtgcacgtcaaatgtcgctgcctccaatgccaagctggctttgttttatgactggctgttctttagtccagacaaggatagcattatgaacatagaaccagccatcctggtcatgcaccactccatgaagccccacccagccatcactgccacactcctggacttcatgtgccgcatcattcccaacttctatccaccattggagggccacgtgcggcagggtgtcttttcctccctcaaccacattgtggagaaacgggtcttggcgtgtaaaaagtattggctctacctcagactgctgggcatatgtcttcttggctcttagaggaatttctctcctgccatcgtattacaaagacacctagctcccctgtttgacaaccctaagttggataaggagctgcgggcaatgctgagagagaagtttcctgagttctgcagctcaccctccccacctgtggaagtcaaaattgaggagccagtttccatggagatggacaaccatatgtcggataaggatgagagttgctatgacaatgcagaggcagccttcagtgacgatgaagaggatctcaacagcaaaggaaagaagagggagtttcgcttccaccctatcaaggagacagttgtggaggagccagttgatatcaccccttaccttgaccagttggatgagtccctgagggacaaagtactccagctacagaaggggagtgatacggaggcccagtgtgaggtcatgcaggaaattgtggaccaggtcctggaggaagactttgactcggagcagctgtctgtccttgcttcctgcctacaggagctcttcaaggcccactttcgaggggaggtcctgcctgaggagattactgaggagtccctggaggagtctgtaggaaagcctctgtacctaatatttaggaacctatgtcagatgcaggaagacaacagcagcttctctctacttctagaccttctctccgagctatatcagaagcagcccaagattggctaccacctgctctactacctgagggccagcaaagccgccgcagggaagatgaacctgtacgagtcatttgcccaggctacccagctgggcgatctgcacacctgcctgatgatggacatgaaggcctgccaggaggacgatgtgcggctcctgtgccacctcacgccctccatctacacagagtttccagatgaaaccttgaggagcggagagctgctgaacatgatcgtggctgttattgactctgcacagctccaggagctggtctgccacgtgatgatgggtaacctggttatgtttcgaaaagactcagttctcaacatactcattcagagcctagactgggagacctttgagcagtattgtgcctggcagctctttctggcccacaatattcccctggagaccataatccccatcctgcagcacctcaaatacaaggagcacccagaggccctgtcctgcctactgcttcaactccgaagagaaaagcccagcgaggagatggtgaagatggtgctgagccggccctgccatcctgacgaccagttcaccaccagcatcctgcggcactggtgcatgaaacatgacgagctgctggccgagcacatcaagtccctgctcatcaagaacaacagcctgcctcgcaagagacagagcctgaggagctctagcagcaagctggcccagctgactctggagcagatcctggagcacttggacaatctgcggctcaacctgaccaacaccaagcagaacttttttagccagacgccaattctccaggcgctgcagcatgtccaagcgagctgtgacgaagcccacaagatgaaattcagtgatctcttctccctggcggaggaatatgaggactcttccaccaagccacccaagagccggcgaaaagcagctctgtccagccctcgaagtcgaaagaatgccacacagccccccaatgccgaagaagagtcgggctccagcagtgcttcagaagaggaagacacgaaaccgaagcctaccaagcggaaacgaaaagggtcctctgcagtgggctctgacagtgactgaggccctgcattccccatcccacccccggctggactgccctctccttcttggtgattcaaaggttaatagaggctgaggagattgcaggggaaacacccttgctgcatccccaagctcccccggtggaaggaggagctttctcctctggctgagtttgagaagctgccatgcagcccctagccccttccctcctcctggggcctccagcccctcacactgctgttcccagtgatatttgggatctgactgaagccagaggctctgtaaaatcagaccatagtggaagtcctcagccccctggccccttccgcaatctcctcccccagtctcccaaagagccatttcaacagagaagggaaatgacaaaggggcagctggccagataagctaggatgagagcagagactcagtgtgtgggtgtcccttcctgcttccccttcaggtcttggtttgttctgaagggacgttttatagtcactatccacatgccagtgtgaaatgggcatctatgacgtggtcagggtgtccattcctaatcatggggcagatgccacaagcattcagaaaggagtctgaaagggtggccacagccccacgtggtgtgccctggaggcttaggttggtctgaggttggcacctcaatctacaccagagcccagggagtcccagaggcaagtttcacagaattgtcaaatgatcccatttccttgagtctgttttttttttttgtttttttttgttttttttttggcagagataatcgtgtcttaaaagttgtttttaaatgacaataaaacaagccagaatgtcaaaaaaaaaa

SEQ ID NO: 294 - DNA, 1927 bp, Homo sapiens
gtaaaccagccggagcggcgcggcagcggcaggaccgccgtggcgcctagagtagcgacccggggggagcgcggggcgacgctggctgcagggacccggtgacagcgtgagaggttcgcagagtactaggttttgacaagcttgcatcatgcgtgagtataagctagtcgttcttggctcaggaggcgttggaaagtctgctttgactgtacaatttgttcaaggaatttttgtagaaaaatacgatcctacgatagaagattcttatagaaagcaagttgaagtagatgcacaacagtgtatgcttgaaatcttggatactgcaggaacggagcaatttacagcaatgagggatttatacatgaaaaatggacaaggatttgcattagtttattccatcacagcacagtccacatttaacgatttacaagacctgagagaacagattcttcgagttaaagacactgatgatgttccaatgattcttgttggtaataagtgtgacttggaagatgaaagagttgtagggaaggaacaaggtcaaaatctagcaagacaatggaacaactgtgcattcttagaatcttctgcaaaatcaaaaataaatgttaatgagatcttttatgacctagtgcggcaaattaacagaaaaactccagtgcctgggaaggctcgcaaaaagtcatcatgtcagctgctttaatatactaaatgcattgtagctctgagccaggtctgaagaactgttgcccaattcaacagtgccagcattccaactttgttaaacctaccaacatcttaaatggactttcctgtggtggtaccctttaagaggcggatgaaagctactatatcagtttgcacattctaatcactttccagtatcacaagagagatttttacttatataatagtcctagagtttgcagctggtaaaaccagaggctacatccagtattactgctaagagacattcttcatccaccaatgttgtacatgtatgaaaatggtgtactgtatactttaacatgccccatactttgtattggagagtacaataatgtaaatcctaaaagcaccactattttagcataataaaagaaagtccaaagagctcctatatagactactccagataacttcgcttctttgatacttgtagcttattgtaattttttttaagaaattcaaggtcattattattgtacaaaataagcgctttgattaacacagctatatagtttttttaatttttaaaaaacctgtggagacggtgatcttgtctttaaaacatgatagtcctttcagtataatgtcttagattaaagacgttgcctttaatatctgttgggaaggaaatgtccagacttttcaaatctcttattatatgtttcctttttttgtttacatagggaacaatgtttatagtcgtgtgtacagtgggggtctacaacaagaagtgtatattttcaaacaattttttaatgatttaacaatttttgtaaatcattttcaggcttctgcagctgtagattctcactgtgaatcccttgcttgctcatgcataagtgtatttgcaataccaaatatacaggtttagtatttttgcctgttagtgattgtttcacatgtgtaacgttttggttgagatgttaaatggtggacgagtactgtggatgtgaatgtgggaagtaattttaatcatatgtaattggtcacaaggcctaatttgcagtaactattgctgttttatttaacaatgccttgttgctttgtatgcattaatgtttggatgtaaagattgtgtgtctatccaacagggagccacagtatttaaattgaccaacctaatgttacaactactttgaggtggccaaatgtaaactaaaagccttaattaaagtggtgcaattttgtaaaaaaaaaa

SEQ ID NO: 295 - DNA, 1453 bp, Homo sapiens
ggctgttggcggcggttggctcggcgcgggagtcggctgcacgtgcgggcgggggcgatgcgtcactgatcggaggaacgagaatgaatatgactcaagcccgggttctggtggctgcagtggtggggttggtggctgtcctgctctacgcctccatccacaagattgaggagggccatctggctgtgtactacaggggaggagctttactaactagccccagtggaccaggctatcatatcatgttgcctttcattactacgttcagatctgtgcagacaacactacaaactgatgaagttaaaaatgtgccttgtggaacaagtggtggggtcatgatctatattgaccgaatagaagtggttaatatgttggctccttatgcagtgtttgatatcgtgaggaactatactgcagattatgacaagaccttaatcttcaataaaatccaccatgagctgaaccagttctgcagtgcccacacacttcaggaagtttacattgaattgtttgatcaaatagatgaaaacctgaagcaagctctgcagaaagacttaaacctcatggccccaggtctcactatacaggctgtgcgtgttacaaaacccaaaatcccagaagccataagaagaaattttgagttaatggaggctgagaagacaaaactccttatagctgcacagaaacaaaaggttgtggaaaaagaagctgagacagagaggaaaaaggcagttatagaagcagagaagattgcacaagtggcaaaaattcggtttcagcagaaagtgatggaaaaagaaactgaaaagcgcatttctgaaatcgaagatgctgcattcctggcccgagagaaagcgaaagcagatgctgaatattatgctgcacacaaatatgccacctcaaacaagcacaagttgaccccggaatatctggagctcaaaaagtaccaggccattgcttctaacagtaagatctattttggcagcaacatccctaacatgttcgtggactcctcatgtgctttgaaatattcagatattaggactggaagagaaagctcactcccctctaaggaggctcttgaaccctctggagagaacgtcatccaaaacaaagagagcacaggttgatgcaagaggtggaaatgttctccatatcaagatgtggcccaaggggttaagtgggaacaatcattatacggactcttcagatttacagagaacttacacttcatctgttccacctctcctgcgatagtcctgggtgctccactgattggaggatagagccagctgtctgacacacaaatggtcttttcagccacagtcttatcaagtatcctatatgtattcctttctaaactgctactcatgaatgaggaaagtctgatgctaagatactgcctgcactggaatgttaaacactaaatatataacaagctgtgttttcgtaa

SEQ ID NO: 296 - DNA, 3120 bp, Homo sapiens
ccgcagagggccggggctacggggcagccccgggcgatgaggggccggcgttgaccgggaagagcgggcaccgcggcagtggctccgaggggacccgcgatggcagcgccctgagaggaggctccaggcagggcgggctgcgctggcagcggccgctgaggtgctggccggccggctggctggcgacgggggcagaagcgacgagaggcgcgctcggcacccgcacccccgtgcccccgcctcagttgtctaaacttcgggctctcttccaccgtctgcgcgcccagagtcaacaacttcttcacccccctccgcccccgcccttccctccgtcagccccgggagctcgccgcggcccggggaccaggaacctccagcgctgagatgtggccgtgaggcgttggcgggcgccgaggagaagctcggcggcgtcccggggccggagggccgtggggccggggcgcaggggcgcgagcaccccgcgcctctcccccgcctcctcctgccgtctccgccgctgcccgtgccttgcaagcagcagccggagctgccaagcgtcagggccgcggagatgtcgtcgtcgtcgccgccggcgggggctgccagcgccgccatctcggcctcggagaaagtggacggcttcacccggaaatcggtccgcaaggcgcagaggcagaagcgctcccagggctcgtcgcagtttcgcagccagggcagccaggcagagctgcacccgctgccccagctcaaagatgccacttcaaatgaacaacaagagcttttctgtcagaagttgcagcagtgttgtatactgtttgatttcatggactctgtttcagacttgaagagcaaagaaattaaaagagcaacactgaatgaactggttgagtatgtttcaactaatcgtggtgtaattgttgaatcagcgtattctgatatagtaaaaatgatcagtgctaacatcttccgtacacttcctccaagtgataatccagattttgatccagaagaggatgaacccacgcttgaggcctcttggcctcacatacagttggtatatgaattcttcttgagatttttggagagccctgatttccagcctagcattgcaaaacgatacattgatcagaaattcgtacaacagctcctggagctttttgatagtgaagatcccagagaacgtgacttcctgaagactgttctgcaccgaatttatgggaaatttcttggattaagagcattcatcagaaaacaaattaacaacattttcctcaggtttatatatgaaacagaacatttcaatggtgttgctgaacttcttgaaatattaggaagtattatcaatggctttgcattgccactgaaagcagaacataaacaatttctaatgaaggttcttattcctatgcatactgcaaaaggattagctttgtttcatgctcagctagcatattgtgttgtacagttcctggagaaagatacaacactaacagagccagtgatcagaggactgctgaaattttggccaaaaacctgcagtcagaaagaggtgatgtttttaggagaaattgaagaaatcttagatgtcattgaaccaacacagttcaaaaaaattgaagagccacttttcaagcagatatccaagtgtgtatccagttctcattttcaggttgcagaaagggcattgtacttctggaataacgaatatattcttagtttgattgaggagaacattgataaaattctgccaattatgtttgccagtttgtacaaaatttccaaagaacactggaatccgaccattgtagcactggtatacaatgtgctgaaaaccctaatggaaatgaatggcaagcttttcgatgaccttactagctcatacaaagctgaaagacagagagagaaaaagaaggaattggaacgtgaagaattatggaaaaaattagaggagctaaagctaaagaaagctctagaaaaacagaatagtgcttacaacatgcacagtattctcagcaatacaagtgccgaataaaaaaaaagcctcccacctctgccggataggcagagttttgtatgcttttttgaaatatgtaaaaattacaaaacaaacctcatcagtataatataattaaaaggccaattttttctggcaactgtaaatggaaaaatatatggactaaacgtagccctgtgctgtatcatggccatagtatattgtaacctttgtctaatcattggatttattgtgtcacttctgaagtttcacagaaatgaatgaattttatcatctatgatatgagtgagataattatgggagtggtaagaattatgacttgaattcttctttgattgtgttgcacatagatatggtagtctgctctgtatatttttcccttttataatgtgcttttcacactgctgcaaaccttagttacatcctaggaaaaaatacttcctaaaataaaactaaggtatcatccttacccttctctttgtctcacccagaaatatgatggggggaattacctgccctaacccctccctcaataaatacattactgtactctggaatttaggcaaaaccttaaatctccaggctttttaaagcacaaaatataaataaaagctgggaaagtaaaccaaaattcttcagattgttcctcatgaatatcccccttcctctgcaattctccagagtggtaacagatgggtagaggcagctcaggtgaattacccagcttgcctctcaattcattcctcctcttcctctcaaaggctgaaggcagggcctttccagtcctcacaacctgtccttcacctagtccctcctgacccagggatggaggctttgagtcccacagtgtggtgatacagagcactagttgtcactgcctggctttatttaaaggaactgcagtaggcttcctctgtagagctctgaaaaggttgactatatagaggtcttgtatgtttttacttggtcaagtatttctcacatcttttgttatcagagtaccattccaatctcttaacttgcagttgtgtggaaaactgttttgtaatgaaagatcttcattgggggattgagcagcatttaataaagtctatgtttgtattttg

SEQ ID NO: 297 - DNA, 1759 bp, Homo sapiens
cagccgttgaggggacgggcctgcgttctctcctccttcctccccgcctccagctgccggcaggacctttctctcgctgccgctgggaccccgtgtcatcgcccaggccgagcacgatgccccctaaaaagggaggtgatggaattaaaccacccccaatcattggaagatttggaacctcactgaaaattggtattgttggattgccaaatgttgggaaatctactttcttcaatgtgttaaccaatagtcaggcttcagcagaaaacttcccgttctgcactattgatcctaatgagagcagagtacctgtgccagatgaaaggtttgactttctttgtcaataccacaaaccagcaagcaaaattcctgcctttctaaatgtggtggatattgctggccttgtgaaaggagctcacaatgggcagggcctggggaatgcttttttatctcatattagtgcctgtgatggcatctttcatctaacacgtgcttttgaagatgatgatatcacgcacgttgaaggaagtgtagatcctattcgagatatagaaataatacatgaagagcttcagcttaaagatgaggaaatgattgggcccattatagataaactagaaaaggtggctgtgagaggaggagataaaaaactaaaacctgaatatgatataatgtgcaaagtaaaatcctgggttatagatcaaaagaaacctgttcgcttctatcatgattggaatgacaaagagattgaagtgttgaataaacacttatttttgacttcaaaaccaatggtctacttggttaatctttctgaaaaagactacattagaaagaaaaacaaatggttgataaaaattaaagagtgggtggacaagtatgacccaggtgctttggtcattccttttagtggggccttggaactcaagttgcaagaattgagtgctgaggagagacagaagtatctggaagcgaacatgacacaaagtgctttgccaaagatcattaaggctgggtttgcagcactccaactagaatactttttcactgcaggcccagatgaagtgcgtgcatggaccatcaggaaagggactaaggctcctcaggctgcaggaaagattcacacagattttgaaaagggattcattatggctgaagtaatgaaatacgaagattttaaagaggaaggttctgaaaatgcagtcaaggctgctggaaagtacagacaacaaggcagaaattatattgttgaagatggagatattatcttcttcaaatttaacacacctcaacaaccgaagaagaaataaaatttagttattgctcagataaacatacaacttccaaaaggcatctgatttttaaaaaattaaaatttctgaaaaccaatgcgacaaataaagttggggagatgggaatctttgacaaacaaattatttttatttgttttaaaattaaaatactgtgtacccccccccccccatgaaatgcaggttcactaaatgtgaacagctttgcttttcacgtgattaagaccctactccaaattgtagaagcttttcaggaaccatattactctcatgatacttcattaatctccatcatgtatgccaagcctgacacatttgacagtgaggacaatgtggcttgctcctttttgaatctacagataatgcatgttttacagtactccagatgtctacactcaataaaacatttgacaaaaccaaaaaaaaaaaaaaaaaaaaaaaaaaaaaaaaaa

SEQ ID NO: 298 - DNA, 2374 bp, Homo sapiens
gtcatgcagtgcgccggagaactgtgctctttgaggccgacgctaggggcccggaaggaaactgcgaggcgaaggtgaccggggaccgagcatttcagatctgctcggtagacctggtgcaccaccaccatgttggctgcaaggctggtgtgtctccggacactaccttctagggttttccacccagctttcaccaaggcctcccctgttgtgaagaattccatcacgaagaatcaatggctgttaacacctagcagggaatatgccaccaaaacaagaattgggatccggcgtgggagaactggccaagaactcaaagaggcagcattggaaccatcgatggaaaaaatatttaaaattgatcagatgggaagatggtttgttgctggaggggctgctgttggtcttggagcattgtgctactatggcttgggactgtctaatgagattggagctattgaaaaggctgtaatttggcctcagtatgtcaaggatagaattcattccacctatatgtacttagcagggagtattggtttaacagctttgtctgccatagcaatcagcagaacgcctgttctcatgaacttcatgatgagaggctcttgggtgacaattggtgtgacctttgcagccatggttggagctggaatgctggtacgatcaataccatatgaccagagcccaggcccaaagcatcttgcttggttgctacattctggtgtgatgggtgcagtggtggctcctctgacaatattagggggtcctcttctcatcagagctgcatggtacacagctggcattgtgggaggcctctccactgtggccatgtgtgcgcccagtgaaaagtttctgaacatgggtgcacccctgggagtgggcctgggtctcgtctttgtgtcctcattgggatctatgtttcttccacctaccaccgtggctggtgccactctttactcagtggcaatgtacggtggattagttcttttcagcatgttccttctgtatgatacccagaaagtatcaagcgtgcagaagtatcaccaatgtatggagttcaaaaatatgatcccattaactcgatgctgagtatctacatggatacattaaatatatttatgcgagttgcaactatgctggcaactggaggcaacagaaagaaatgaagtgactcagcttctggcttctctgctacatcaaatatcttgtttaatggggcagatatgcattaaatagtttgtacaagcagctttcgttgaagtttagaagataagaaacatgtcatcatatttaaatgttccggtaatgtgatgcctcaggtctgcctttttttctggagaataaatgcagtaatcctctcccaaataagcacacacattttcaattctcatgtttgagtgattttaaaatgttttggtgaatgtgaaaactaaagtttgtgtcatgagaatgtaagtcttttttctactttaaaatttagtaggttcactgagtaactaaaatttagcaaacctgtgtttgcatatttttttggagtgcagaatattgtaattaatgtcataagtgatttggagctttggtaaagggaccagagagaaggagtcacctgcagtcttttgtttttttaaatacttagaacttagcacttgtgttattgattagtgaggagccagtaagaaacatctgggtatttggaaacaagtggtcattgttacattcatctgctgaacttaacaaaactgttcatcctgaaacaggcacaggtgatgcattctcctgctgttgcttctcagtgctctctttccaatatagatgtggtcatgtttgacttgtacagaatgttaatcatacagagaatccttgatggaattatatatgtgtgttttacttttgaatgttacaaaaggaaataactttaaaactattctcaagagaaaatattcaaagcatgaaatatgttgctttttccagaatacaaacagtatactcatgaattgctaagtgtttttttatttttgcatatttattgaactgtctaattgaatacagcttgctcttgtcacctcttcaagctttcaagcctttatagaaaagcttctttgtggcttacactggaaattatgaaagcagtttttctcctaagacttttggtttctcgcattgcctctcagactaagcactaaaaagcaaagcaaaacagaactagttctgtcttaatgaaatatatcaacccaaaagtgtaatgaggaaaatgcttcattagtttcccctagcagacttttacttctcttacactgctacaccattactttcttgagacatttgtaagtcctttgatacagaagagttatatttaggaggctttaatgaaggg

SEQ ID NO: 299 - DNA, 5112 bp, Homo sapiens
gtagctggggtgaggccgtcgtcgccgcacgggctggttggggctgtgtctgtgggaggcgccggggtgatggcggtggagactctgtccccggactgggagtttgaccgcgttgacgacggctcgcagaaaattcatgccgaagtccaacttaagaattatgggaaatttcttgaggagtatacctctcaactgagaagaattgaggacgctctggatgactcaattggagatgtttgggatttcaatcttgatcctatagcattaaagcttttgccttatgaacagtcctctcttttggaactcataaagactgaaaacaaggtcttaaacaaagtcatcactgtttatgctgcactttgttgtgaaatcaagaaattaaaatatgaggctgaaactaaattttacaatggtctcttgttttatggagaaggagctacagatgccagcatggtggaaggtgattgccaaattcaaatggggagatttatttcattcttacaggaactgtcttgctttgttacgaggtgctatgaagtggtgatgaacgtagtccaccagttggctgccctctatatcagtaacaagattgcacccaaaattatagagacaactggagttcattttcagactatgtatgagcacttgggagaactgctaacagttttgctcaccctggatgaaattattgataatcatatcacactgaaagaccactggactatgtacaaaaggttactgaaatctgtccatcacaatccttcaaaatttggaattcaggaagaaaaattaaagccatttgaaaagttcttgctgaagctagaagggcaattactggatggaatgatattccaggcctgtatagaacaacaatttgattctctcaatggaggagtatctgtgtcaaaaaatagtacttttgctgaggaatttgcacatagtattcggtcaatttttgcaaatgtagaagccaaacttggagaaccttctgaaattgaccagagagacaagtatgttggaatttgtggactctttgtattgcactttcagatttttcgaactattgataaaaagttttataagtctttattggacatttgtaagaaggtaccagccatcactctaactgctaatattatttggtttcctgataattttctgatccagaaaataccagcagctgccaaactgctagacagaaaaagtcttcaagccattaaaatacacagggatacttttctacaacagaaagctcaatcacttaccaaagatgtacagtcttactacgtctttgtgagctcatggatgatgaaaatggaatctattttgtctaaagagcagagaatggataaatttgctgaagatctcaccaatagatgtaatgtttttatacagggcttcttgtatgcatatagtattagtaccattattaaaaccacaatgaatctctacatgtccatgcaaaagccaatgaccaaaacctcagttaaggcattgtgcaggcttgttgaacttctcaaggcaatagagcatatgttctacaggagaagcatggttgtggctgattcagtttcacatataacacagcaccttcaacatcaggctcttcattctatttctgtggccaagaaaagagtgatttctgacaaaaaatacagcgaacagcgtcttgatgtgctctctgctctagttttggctgaaaacactctaaatggaccaagcacaaagcaacggcgacttattgtttctttggcactaagtgttggcacacaaatgaaaacatttaaagatgaagaactctttccacttcaagtagtcatgaaaaaactggatcttattagtgaacttagagaacgagtccaaacacaatgtgactgttgttttttatactggcatcgagctgtcttcccaatttatttagatgatgtatatgaaaatgctgttgatgcagccagattacattacatgttcagtgctttgcgcgactgtgtacctgctatgatgcatgcaaggcatttagagtcctatgagatacttctggattgctatgacaaggaaattatggaaattttaaatgagcatttgctggacaaattatgcaaagaaatagagaaagatctgcgactttctgtgcatactcatttaaagctggatgaccgaaaccctttcaaagttggcatgaaagacctggctctttttttctctctgaatccaattcggtttttcaatcgtttcattgacattcgggcttacgtaactcactacctagacaagactttctacaatctaacaactgtagcccttcatgactgggccacttatagtgagatgagaaacttagctactcagcgttatggactggttatgacagaggcacatcttcccagtcagactttggaacagggccttgatgttttagaaattatgagaaacattcatatatttgtgtcccgatacctctataatctcaacaatcagatttttattgaacgaacaagcaataacaagcatttgaatactattaatattcggcatattgctaattcaattcgaacacatggcacgggaattatgaatacaactgttaatttcacctaccagtttttgaaaaagaagttctatatatttagccaatttatgtatgatgaacacatcaaatccagattgattaaagatattcgatttttcagggaaattaaggaccaaaatgatcataagtatccttttgatagagcagaaaaattcaatcgaggcatcagaaaacttggaataacacctgagggacagagctaccttgatcaattcaggcaactcatcagccagattggtaatgctatgggctatgtacgaatgataagatctggtggtcttcattgtagcagcaatgccattagatttgttcctgatcttgaagatattgtaaattttgaagaactagtaaaagaagaaggtcttgcagaagaaacattaaaagcagcaaggcatttggattcagtcctcagtgatcacacacgaaattctgccgaaggcacagaatatttcaaaatgcttgtagacgtttttgctccagaatttcgaaggccaaagaatatacatctccgaaatttctatataattgttccccctctgaccctcaactttgtagagcattccattagttgcaaggaaaaattaaataaaaaaaataaaattggagctgcctttactgatgatggctttgccatgggtgtggcttacattctaaagcttttggatcagtatcgggagtttgattcacttcactggttccagtctgttagagagaaatacctgaaggagataagagcagttgctaagcaacagaatgtacagtcagccagtcaagatgaaaaactcttacaaaccatgaatctcactcagaagcgactggatgtctatctacaggaatttgaattgctgtatttctcactgagcagtgcaagaattttcttcagagcagacaagactgcggctgaagaaaaccaagaaaagaaagagaaggaagaagaaactaaaacaagcaatggagacctgtctgacagcactgtgtctgctgatcctgttgtgaaatgatacggatggtattcactgcacatatgatgaaatcatcagaattgttaaaacttttgccagtggaatggataaactattgatgaattgtttcctgggtcacatctctggaaaatagatgttacagttcttaaaggcagtgctttaaagtgaagttcattctgtttccaaaggctctactttcaaaggttaagaatgagattttaaaattggatttttgcctggacttgagggtacaagatgtttctatttgaagtgaagttataaaagggcaaatccagattcataaactatcacctcggatttcttgtaatctacatgtttgtaatttgtatttgcatagatctttgatctatagttatttcaagtcatgggaaattcaatgcatatactatatacagccagtaaatacatgcttaacaaaaggaatgagcctgaagttcataaagaatacatatcaatattcttataaaaggaatatatgaagatggctttgatactagaggtgaggcacaagtgttttatgtactctcagtgtacagtataactgatgatccttctttcattgttaatttcatgtgactcacaagagctgctgatgtctttgatgagacattttataactagtttacattgctttgagaacatttaacctccaacagctgctttaaatttaagatttacttaatactcagaaaattcagataaagccatagagtcctgtttgaagcttcacttctattttggttgaaggcatgatgtatgatgtcagaaaaaaaattgaatgaattatttctacatccaaactcaggtttcttctacattagattgaattgaaattttggtgatggtttgggtagactttttttttatatcaagtataatttaaaacatcagattaaataattacactgttcaggcttttaaaaaaataccactgtgagaataaagcgctagtaagatacatcacttactgattttaaaaatacagaaagattttgagtaaattttgtgcccagcaagctgttagttttatttttgtaaaggtatgtaagttattaaatggttaatcatggccttttaaaaataaaataaagtgatacctttacaatgaagacaaaagtttaaaactttctaatacaaacaccattttgggaaatgcttgatttttttctattgcatttgtctgctaaacatttctttggataaatcctgcaaatacttctaacattattctttgattccagcttttagaatgggtgtacaatgccctgtttgtacttaatggttagggtcagggtaacttgccagcccaagataaatactttaatcgttaaaagtcagaagagacagaatatgtaggaaatgttttttgtttattatgtaaacatggcttacagaattatgaacagtggatagattaaaggcatttaatatttgtaattcataataactgtagaaatggccctaaagcatgctgcataattaataatttatattttcattattataagtgtttatatt

SEQ ID NO: 300 - DNA, 4834 bp, Homo sapiens
gatgtggagctggggtccctgcaagtcatgaacaaaacgagaaagattatggaacatgggggggccaccttcatcaatgcctttgtgactacacccatgtgctgcccgtcacggtcctccatgctcaccgggaagtatgtgcacaatcacaatgtctacaccaacaacgagaactgctcttccccctcgtggcaggccatgcatgagcctcggacttttgctgtatatcttaacaacactggctacagaacagccttttttggaaaatacctcaatgaatataatggcagctacatcccccctgggtggcgagaatggcttggattaatcaagaattctcgcttctataattacactgtttgtcgcaatggcatcaaagaaaagcatggatttgattatgcaaaggactacttcacagacttaatcactaacgagagcattaattacttcaaaatgtctaagagaatgtatccccataggcccgttatgatggtgatcagccacgctgcgccccacggccccgaggactcagccccacagttttctaaactgtaccccaatgcttcccaacacataactcctagttataactatgcaccaaatatggataaacactggattatgcagtacacaggaccaatgctgcccatccacatggaatttacaaacattctacagcgcaaaaggctccagactttgatgtcagtggatgattctgtggagaggctgtataacatgctcgtggagacgggggagctggagaatacttacatcatttacaccgccgaccatggttaccatattgggcagtttggactggtcaaggggaaatccatgccatatgactttgatattcgtgtgcctttttttattcgtggtccaagtgtagaaccaggatcaatagtcccacagatcgttctcaacattgacttggcccccacgatcctggatattgctgggctcgacacacctcctgatgtggacggcaagtctgtcctcaaacttctggacccagaaaagccaggtaacaggtttcgaacaaacaagaaggccaaaatttggcgtgatacattcctagtggaaagaggcaaatttctacgtaagaaggaagaatccagcaagaatatccaacagtcaaatcacttgcccaaatatgaacgggtcaaagaactatgccagcaggccaggtaccagacagcctgtgaacaaccggggcagaagtggcaatgcattgaggatacatctggcaagcttcgaattcacaagtgtaaaggacccagtgacctgctcacagtccggcagagcacgcggaacctctacgctcgcggcttccatgacaaagacaaagagtgcagttgtagggagtctggttaccgtgccagcagaagccaaagaaagagtcaacggcaattcttgagaaaccaggggactccaaagtacaagcccagatttgtccatactcggcagacacgttccttgtccgtcgaatttgaaggtgaaatatatgacataaatctggaagaagaagaagaattgcaagtgttgcaaccaagaaacattgctaagcgtcatgatgaaggccacaaggggccaagagatctccaggcttccagtggtggcaacaggggcaggatgctggcagatagcagcaacgccgtgggcccacctaccactgtccgagtgacacacaagtgttttattcttcccaatgactctatccattgtgagagagaactgtaccaatcggccagagcgtggaaggaccataaggcatacattgacaaagagattgaagctctgcaagataaaattaagaatttaagagaagtgagaggacatctgaagagaaggaagcctgaggaatgtagctgcagtaaacaaagctattacaataaagagaaaggtgtaaaaaagcaagagaaattaaagagccatcttcacccattcaaggaggctgctcaggaagtagatagcaaactgcaacttttcaaggagaacaaccgtaggaggaagaaggagaggaaggagaagagacggcagaggaagggggaagagtgcagcctgcctggcctcacttgcttcacgcatgacaacaaccactggcagacagccccgttctggaacctgggatctttctgtgcttgcacgagttctaacaataacacctactggtgtttgcgtacagttaatgagacgcataattttcttttctgtgagtttgctactggctttttggagtattttgatatgaatacagatccttatcagctcacaaatacagtgcacacggtagaacgaggcattttgaatcagctacacgtacaactaatggagctcagaagctgtcaaggatataagcagtgcaacccaagacctaagaatcttgatgttggaaataaagatggaggaagctatgacctacacagaggacagttatgggatggatgggaaggttaatcagccccgtctcactgcagacatcaactggcaaggcctagaggagctacacagtgtgaatgaaaacatctatgagtacagacaaaactacagacttagtctggtggactggactaattacttgaaggatttagatagagtatttgcactgctgaagagtcactatgagcaaaataaaacaaataagactcaaactgctcaaagtgacgggttcttggttgtctctgctgagcacgctgtgtcaatggagatggcctctgctgactcagatgaagacccaaggcataaggttgggaaaacacctcatttgaccttgccagctgaccttcaaaccctgcatttgaaccgaccaacattaagtccagagagtaaacttgaatggaataacgacattccagaagttaatcatttgaattctgaacactggagaaaaaccgaaaaatggacggggcatgaagagactaatcatctggaaaccgatttcagtggcgatggcatgacagagctagagctcgggcccagccccaggctgcagcccattcgcaggcacccgaaagaacttccccagtatggtggtcctggaaaggacatttttgaagatcaactatatcttcctgtgcattccgatggaatttcagttcatcagatgttcaccatggccaccgcagaacaccgaagtaattccagcatagcggggaagatgttgaccaaggtggagaagaatcacgaaaaggagaagtcacagcacctagaaggcagcgcctcctcttcactctcctctgattagatgaaactgttaccttaccctaaacacagtatttctttttaacttttttatttgtaaactaataaaggtaatcacagccaccaacattccaagctaccctgggtacctttgtgcagtagaagctagtgagcatgtgagcaagcggtgtgcacacggagactcatcgttataatttactatctgccaagagtagaaagaaaggctggggatatttgggttggcttggttttgattttttgcttgtttgtttgttttgtactaaaacagtattatcttttgaatatcgtagggacataagtatatacatgttatccaatcaagatggctagaatggtgcctttctgagtgtctaaaacttgacacccctggtaaatctttcaacacacttccactgcctgcgtaatgaagttttgattcatttttaaccactggaatttttcaatgccgtcattttcagttagatgattttgcactttgagattaaaatgccatgtctatttgattagtcttatttttttatttttacaggcttatcagtctcactgttggctgtcattgtgacaaagtcaaataaacccccaaggacgacacacagtatggatcacatattgtttgacattaagcttttgccagaaaatgttgcatgtgttttacctcgacttgctaaaatcgattagcagaaaggcatggctaataatgttggtggtgaaaataaataaataagtaaacaaaatgaagattgcctgctctctctgtgcctagcctcaaagcgttcatcatacatcatacctttaagattgctatattttgggttattttcttgacaggagaaaaagatctaaagatcttttattttcatcttttttggttttcttggcatgactaagaagcttaaatgttgataaaatatgactagttttgaatttacaccaagaacttctcaataaaagaaaatcatgaatgctccacaatttcaacataccacaagagaagttaatttcttaacattgtgttctatgattatttgtaagaccttcaccaagttctgatatcttttaaagacatagttcaaaattgcttttgaaaatctgtattcttgaaaatatccttgttgtgtattaggtttttaaataccagctaaaggattacctcactgagtcatcagtaccctcctattcagctccccaagatgatgtgtttttgcttaccctaagagaggttttcttcttatttttagataattcaagtgcttagataaattatgttttctttaagtgtttatggtaaactcttttaaagaaaatttaatatgttatagctgaatctttttggtaactttaaatctttatcatagactctgtacatatgttcaaattagctgcttgcctgatgtgtgtatcatcggtgggatgacagaacaaacatatttatgatcatgaataatgtgctttgtaaaaagatttcaagttattaggaagcatactctgttttttaatcatgtataatattccatgatacttttatagaacaattctggcttcaggaaagtctagaagcaatatttcttcaaataaaaggtgtttaaacttt

SEQ ID NO: 301 - DNA, 4112 bp, Homo sapiens
caaggcgcctgcgactcggtcccaggtcggcgggcggcgcgcggcgggctcgcgcgggggccccggcgcgccgggcggcgcagtacgcagcgcgcggacccacgccacggccaggagcccagagcagcgcggccacactgcccaggggtcggccctcggccccggcgctcggagcgcggcggctgcctgggctttaatggctgctccgcggagcagcgcctagggctggaaggcggctgcggctcaggaagtcacccgagcaagcctccttcggggccggccgcacccgccgcggcgcgctccatgggggcgcgctccccccgggcggcccgctgacccgggacgccggggcccgctcgctcgccggccgcgcgtcccggccatgaactgagcccgcgggccagccccgcgcctgctccgcccgcgcctttcttctcgcgcctcctccgcccgccgccggcgggcccggctccccgggggctgcggcgccccgggctcggcggcccgcgggccccggggcgcggggcggcggcggcggggggcgcgcggctccgggcgcggcgcctgcaccatgaactaccagcagcagctggccaactcggctgccatccgggccgagatccagcgcttcgagtcggtccaccccaacatctactccatctacgagctgctggagcgcgtggaggagccggtgctgcagaaccagatccgggagcacgtcatcgccatcgaagatgccttcgtgaacagccaggaatggacgctgagtcgatctgtcccggagctcaaagtgggaattgtgggtaacttggccagcggcaagtctgccctggtgcaccggtacctgacgggcacatatgtccaggaggagtctccggaaggtggcaggttcaagaaagagattgtcgttgatggacagagctatctgctgctgatcagagatgaagggggccccccggaggcgcagtttgccatgtgggtggacgctgttatatttgtcttcagcttggaggatgaaataagtttccagaccgtttaccactactacagtcgaatggccaactatcggaacacgagcgagattcctctggttctggtgggaacccaggatgccataagttctgctaacccgagggtcatcgatgacgccagggcgaggaagctctccaacgacctgaaacggtgcacgtactacgagacgtgtgctacatacgggctgaatgtggagagggtcttccaggacgttgcccagaagattgttgccacaaggaagaagcagcagctgtccataggaccctgcaagtcgctacctaattctcccagccattcctccgtctgttccgcgcaggtgtctgccgtgcacatcagccagacaagtaatggaggtgggagtttaagcgactattcctcctccgttccatcgactcccagcatcagccagaaggaacttcggatcgatgttcctcccactgccaacacgcccacgcccgttcgcaagcagtctaagcgccggtccaacctgttcacctctcggaaagggagcgacccagacaaagagaagaaaggcctggagagtcgtgcggacagcattgggagcggccgagccatcccaattaaacagggcatgctgttgaagcgaagtggcaaatcgttgaataaagagtggaaaaagaaatatgtcaccctgtgtgacaatggcgtgctgacctatcatcccagtttacatgattacatgcagaatgttcatggtaaggagattgaccttctgagaaccactgtgaaagtcccagggaagaggccaccccgagccacgtcagcctgcgcacccatctccagccctaaaaccaatggcctatccaaggacatgagcagtttacacatctcacccaattcagacacagggctgggtgactccgtatgctccagccccagtatctccagcaccaccagccccaagctcgacccgcccccctcccctcacgccaacagaaagaagcaccgaaggaagaaaagcactagcaacttcaaagccgacggcctgtccggcactgctgaagaacaagaagaaaattttgagtttatcattgtgtccctcactggccaaacatggcactttgaagccacgacgtatgaggagcgggacgcctgggtccaagccatcgagagccagatcctggccagcctgcagtcgtgcgagagcagcaagaacaagtcccggctgacgagccagagcgaggccatggccctgcagtcgatccggaacatgcgcgggaactcccactgtgtggactgcgagacccagaatcccaactgggccagtttgaacttgggagccctcatgtgcatcgaatgctcagggatccaccggaatcttggcacccacctttcccgagtccgatctctggacctggatgactggccaatcgagctcatcaaggtgatgtcatccatcgggaacgagctagccaacagcgtctgggaagagagcagccaggggcggacgaaaccatcggtagactccacaagggaagagaaggaacggtggatccgtgccaagtacgagcagaagctcttcctggccccgctgccctgcacggagctgtccctgggccagcacctgctgcgggccaccgccgacgaggacctgcggacggccatcctgctgctggcacacggctcccgggacgaggtgaacgagacctgcggggagggagacggccgcacggcgctgcatctggcctgccgcaaggggaatgtggtcctggcgcagctcctgatctggtacggagtggacgtcacggcccgagatgcccacgggaacacagctctggcctacgcccggcaggcctccagccaggagtgcatcgacgtgctgctgcagtacggctgccccgacgagcgcttcgtgctcatggccacccctaacctgtccaggagaaacaataaccggaacaacagcagtgggagggtgcccaccatcatctgaggaacagccgtgcccgcctgctcgccgcacctgggacgcggcagcctcgccgcattctcgctcagaagtcgcagcacgtgagtcccgtcgcatcccctccctcttcctggtggccacctccctcccgcccacccactctcaccccaaacaaaatcacaaaacctggacatccctcaaggggcgaagaggcggccgggagactgcagaagtggctccttttcataaactcccctaaaccacacacaggagagagcgacgggcctcggccctttgatgatagcacatggcgcaggacccttgtcctggtggcacaagggatggggacgcgagggggaggggaggcgaggaacaaggagaaggggcaactttccttaactggcagttgagcacatagtacatttcccctctaccaaacggaacacttggattccatctcttctctgaggagctcgacggcataaatcagaagcaagcacagagtttgtcaggtttgaagcccctatgatggtgtgtgtcaaatcagttgtagctaatctgtccagggagaatactggcttcattacacttgtacagccgagttcttcccgcattactgctgtttaatagaacgtgattagtcatcgccgagaagaaagcatattagccgaggaggtagtcacgcggcacgcgccggtgattgccacgatgtgattgcaatactcttagaagcaccatattatcccagacatgttctttcaagcccttggagccctctctaaattcactgtcatcatttagtatctgtttaatttttcagtccaaagagaggaaatcagtcgctgagtattatttgactccggtctccttggtgcaaaaacaaaatgggaaaaataaataagaataactcagaaactcaaaaggaaaccacaaattcagctaataatagcatttcgagtatatttcgtaaactaaggaaatacacaaaaggctgtttttttccgactgtaagagatatttgatgtccttttgccgaggtggatgtgttagtctcaggccctcctggaccacgttgcccaagtcacacaggcttctgtgttatgtatttagataagatgtgtgaaaatatatttgaataaaagaagttcat

SEQ ID NO: 302 - DNA, 1096 bp, Homo sapiens
gggggagcactagcagcagccggagtcggcggaaagcacccgggcgcagccggagccggtgccgcagctgcgatggccgtggccgtggggagaccgtctaatgaagagcttcgaaacttgtctttgtctggccatgtgggatttgacagcctccctgaccagctggtcaacaagtctacttctcaaggattctgtttcaacatcctttgtgttggtgagacaggcattggcaaatccacgttaatggacactttgttcaacaccaaatttgaaagtgacccagctactcacaatgaaccaggtgttcggttaaaagccagaagttatgagcttcaggaaagcaatgtacggctgaagttaaccattgttgacaccgtgggatttggagaccagataaataaagatgacagctataagccgatagtagaatatattgatgcccagttcgaggcctacctgcaagaggaattgaagattaaacgttctctcttcaaccaccatgacacgaggatccatgcctgcctctactttattgcccctactggacattcactaaagtccctggatctggtcaccatgaaaaagctggacagtaaggtgaacatcattccaataattgcaaaagctgacaccattgccaagaatgaactgcacaaattcaagagtaagatcatgagtgaactggtcagcaatggggtccagatatatcagtttcccactgatgaagaaacggtggcagagattaacgcaacaatgagtgtccatctcccatttgcagtggttggcagcaccgaagaggtgaagattggcaacaagatggcaaaggccaggcagtacccctggggtgtggtgcaggttgagaatgaaaatcattgcgattttgtgaaacttcgagagatgctgatccgcgtgaacatggaggacttgcgagagcagactcacacccgccactatgaattgtaccacgctgtaagcttgaagagatggggttcaaggacactgaccctgacagcaaacccttcagtcttcaggggacatatgaagcaaaaaggaatgaattcctgggagaactgcagaaaaaaaaaaaaaaaaaaaa

SEQ ID NO: 303 - DNA, 4373 bp, Homo sapiens
gaagcgaatgtgattcttccccagaaccgaaagctttgcctcagactcctaggccgaggagtcgttctccatcatccccagagctcaacaacaagtgtcttaccccccagagagaaagaagcgggtcagaatcatcagttgatcagaaaactgtggctcggactcccctggggcagagaagtcgttcgggatcctctcaagaacttgatgtgaaacccagtgcatcccctcaggaaagaagtgagtcagactcttctccagattctaaagccaagacacgaaccccacttcggcagaggagtcggtctggatcatctccagaggttgacagcaaatctcgactatcccctcggcgcagtaggtctggttcctcccctgaagtgaaagataagccaagagcagcacccagggcacagagtggttctgattcctctcctgaacctaaagctccagcccctcgggcccttcccagacgaagcagatcaggttcatcaagcaaaggcagaggcccttctcctgaaggaagcagcagtaccgagtcctctcctgaacatccgcccaaatccagaactgctcgcagaggttccaggtcatcaccagagcccaagaccaagtctcgtacaccacctcgacgtcgcagctctcgatcatctccggagctaacaaggaaggccagactgtcccgtagaagccgctctgcctcatcctcaccagaaactcgctctagaactcccccaaggcaccggagaagtccctcagtgtcttccccggagccagccgaaaaatcgaggtcttcacgccgacggcgctcagcttcatctccacgcactaagacaacctcaaggagaggccgctctccttcgccaaagcctcgtggactccagaggtcccgttcccgctcaaggagagagaaaacaagaacaacccgacgtcgagataggtctggatcttctcagtcaacctctcggcgaagacagcggagccggtcaaggtcgcgggttactcggcggcggaggggaggctctggttatcactcaaggtcacctgcccggcaggaaagttcccggacctcctctcgacgccgaagaggccgctctcggacacccccaaccagtcggaagcgttctcgctcacgcacatcaccagccccgtggaaacgctctagatctcgagcctctccagccactcaccggcgatccaggtccagaacccccctgataagccgacgtaggtccagatctcgaacttcaccagtcagccggagacggtcaaggtccaggacttcagtgactcgacgaagatcccggtcaagagcatccccagtgagcagaaggcgatccagatccagaacgccaccagtaacccgccgtcgttcaaggtctagaacgccaacaacacgccgccgctcccgttctagaactccaccagtgactcgcagaaggtccagatccaggactccaccagtaaccaggaggcgatctcgaagcagaacttcgcctatcactcgcagaagatcaagatccagaacatctccggtcacccgaaggagatctcgatctcgcacatctccagtaactcgaagaaggtcccgctctcgaacctcaccagtgacacgccgccgctctaggtcccggacacctccagctattcggcgccgctctagatctcgaacgccactgttaccacgcaaacgttctcgaagtcgctcaccacttgctatccgccgccgctccagatcccgtactccacgaacagctcggggtaaacggtccttaacaagatctcctccagccatccgcaggcgttctgcatctggaagtagttctgatcgttcacgatctgctactcctccagcaacaagaaatcattctggttcacggacacctccagtagcactcaacagttccagaatgagctgcttcagtcgtcctagcatgtccccaacacctcttgatcgctgcagatcacctggaatgcttgaaccccttggcagctctagaacacccatgtctgtcctgcagcaagccggcggctccatgatggatggtccaggtccccgaatacctgaccaccagagaacatctgtgccagaaaatcatgctcagtccaggattgcacttgccctgacagctatcagtcttggcaccgctcggcctcctccgtccatgtctgctgctggccttgctgcaagaatgtcccaggttccagccccggtgcctctcatgagtctcagaaccgcaccagcagccaaccttgccagcaggattcctgcagcctctgcggcagccatgaacctagccagcgccaggacacctgccattccaacagcagtgaacctggctgactctcgaacgccagctgcagcagcggccatgaacttggccagccccagaacagcggtggcaccttcggctgtgaacctggctgaccctcgcactcccacagccccagctgtgaacctagcaggggccagaaccccagctgccttggcagctctgagtctcacaggctctggcacaccaccaactgctgcaaactatccctccagctccagaacaccacaggctccagcctctgcaaacctggtgggtcctcggtctgcacatgccacagctcctgtgaatattgccggctccagaaccgccgcagccttggcccccgcgagcctcaccagtgctaggatggctccagcattgtctggtgcaaacctcaccagccccagggtgcccctttctgcctacgagcgtgtcagtggcagaacctcaccaccgctccttgaccgagctaggtccagaacaccaccgtctgccccaagccaatctaggatgacctctgaacgggctccctccccttcctctagaatgggccaggctccttcacagtctcttctccctccagcacaggatcagccgaggtctcctgtgccttctgctttttcagaccaatcccgttgtttgattgcccagaccacccctgtagcagggtctcagtccctttcctctggggcagtggcaacgaccacgtcctctgctggtgatcacaatggcatgctctctgtccctgcccctggggtgccccactctgatgtgggggagccacctgcctctactggggcccagcagccttctgcattagccgccctgcagccagcaaaggagcggcggagttcctcctcgtcgtcgtcgtcctctagctcctcctcctcttcatcatcgtcgtcgtcgtcctcctcctcctctggctccagttctagtgactcagagggctctagccttcctgtgcaacctgaggtggcactgaagagggtccccagccccaccccagccccaaaggaggctgttcgagagggacgtcctccggagccaaccccagccaaacggaagaggcgctctagcagttccagttccagctcctcctcttcatcttcctcctcctcctcctcctcctcttcttcctcctcctcttcctcttcttcttcttcctcctcatcttcctcctcctcgtcgtcttcctccccttcccctgctaagcctggccctcaggccttgcccaaacctgcaagccccaagaagccaccccctggcgagcggaggtcccgcagcccccggaagccaatagactccctcagggactctcggtccctcagctactcgcctgtggagcgtcgccgtccctcgccccagccctcaccacgggaccagcagagcagcagcagtgagcggggttcccggagaggccagcgtggggacagccgctcccccagccacaagcgcaggagggagacacctagccctcggcccatgagacaccgctcctccaggtctccataaattgtctttgggggattccaccacacccaatgctctggagccacaaggagtgtcccttcttccccagcagagccgtgggagggtccttgtctgctctcctttgaaccttggcagcccttggatggagggctccctttccctccccttttttttttctttgttcctgtgaaatgttaatctccgtgagttcttcctggttcatgtgttctggggggtttggggtgggagggaatgcagatgggagttgggggaggggaggatacagttcaggataccccagcctggagtcagggccagggaggcatggccccacttgtatccagaagttcccaggggtgattgtgatggtggttgggactggaggttgtataaggtgttcttggaaggaaggggcaggagttggaattagttggtccctactgtcccccatgaggttgtgaacccctccccccaacttttcatgtttcttaaaggcattttggttttttaaaatctgtacagcaagagcaactttttctgtcaaataaaaatgagaaatgcagg

SEQ ID NO: 304 - DNA, 9027 bp, Homo sapiens
gcggcccaggcggggtgcgagtggcgcagtcggagcccgttgcggcccctgaggaagcgaggaggcgtcggcgtcggctgaggcgggcggaccggcgaggcgaggcggcggccccaggcccgagggactcgggagctcgagcagcggcggcggcaagacctctccccctcggaggcggcgggcggaggcggcgggagcggtggtgccccccccgggcacggggccatgtacaacgggatcgggctgccgacgccccggggcagcggcaccaacggctacgtccagcgcaacctgtccctggtgcggggccgccggggtgagcggcctgactacaagggagaggaggaactgcggcgcctggaggctgccctggtgaagcggcctaatcctgacatcctggaccacgagcgcaagcggcgcgtcgagctgcgatgcctcgagctggaggagatgatggaagagcaggggtacgaggaacagcaaattcaggaaaaagtggcgacctttcgactcatgttgctggagaaggatgtgaaccctgggggcaaggaggagaccccagggcagaggccagcggtcacggagactcaccagttggcagaattaaatgagaagaagaatgaaagactccgtgctgcctttggcatcagtgattcttacgtagatggcagctcttttgatcctcagcgtcgtgcccgagaagctaaacaaccagctcctgagcctcccaaaccttacagccttgttcgggagtctagcagttctcgctcaccaaccccaaagcagaagaagaagaaaaagaagaaagatagaggacgcaggtcagagagcagctctcctcgacgggagagaaagaaaagctcaaagaagaagaagcacaggtcagaatctgagtccaagaaacgtaagcataggtctcccactccaaagagcaaacgtaaatctaaggacaaaaagcgaaagcggtctcgaagtacaacaccagcccccaagagccgccgggcccaccgttcaacttctgctgactctgcttcctcctccgatacttcccgcagtcggtctcgaagtgctgcagctaaaactcatacaactgccttggctgggcgaagtccttcccctgcttcagggcgacgcggggagggagatgcgcctttcagtgaaccaggtactaccagcacacaacggcctagtagcccggagactgctacgaaacagcctagcagcccttatgaagacaaagataaagacaagaaggagaaatctgcaactcgacctagcccctctccggaaaggagcagcacaggcccagaaccacctgctcccactccgctccttgctgagcgacatggcggctccccacaaccccttgcaaccacccccttaagccaggagccagtgaaccccccatctgaggcctctccaactcgggaccgttcaccacctaagtctcccgagaaacttccccagtcttcttcctcagagagcagcccaccatcccctcaacctaccaaagtttctcggcatgccagctcttccccagaaagtcctaaacctgctccagctccagggtcccaccgagagatttcttcttctcccacatctaagaatcgctcacatggccgagcaaaacgggataaatcacattctcataccccctcccgtaggatggggaggtcccgtagccctgccaccgctaagagagggcgatctcggtctcgaacccctaccaagagaggtcattctcgatcccgatctccccagtggcgtaggtccaggtctgcacagaggtggggaagatctagaagcccccagcgacgtggccgctctaggtctcctcagcgaccaggctggtctaggagcagaaatacccagagaagaggcaggtctaggtcagcaaggcgagggaggtcccactctagatccccagccactaggggtagatctcgttctagaacaccagcccgccggggcaggtcccgctctagaacacctgccaggcggagatcacgatccagaactcccaccaggcgtaggtctcggtctagaacaccagcccggaggggcaggtctcggtctagaacacctgctaggcgcagatctaggacccgatcaccagtacgacgcaggtctcgtagtagatcaccagccaggagaagtggcaggtcacgctctagaaccccagctagacgtggccgctcacgctccagaaccccagccagacgtggccgctcacgctctagaaccccagctagacgcagtggtcgctcacgctccagaacaccagccaggagagggaggtctcggtctaggacaccaagacgaggaagatcccgcagtagaagcttagttagacgtggaagatctcactctagaacacctcaaagaagaggcagatctggctcatcttcagagcggaaaaacaaatccagaacatctcaaagaagaagcaggtccaattcaagcccagaaatgaagaaatctcgcatttcttcaaggcggagcaggtctctctcttcaccacggtccaaagcaaaatctcgcttgtctttgaggcgcagcctttcagggtcttccccatgccctaagcaaaagtcacagacaccacccaggcgcagtcgctctggatcctcccaacctaaagctaaatctagaacgccacccagacgcagtcgctccagttcttctccgccacctaaacagaaatctaagacaccatcaagacaaagtcattccagttcatctcctcatcctaaagtgaaatctggaacaccaccgaggcaagggtccataacaagtccccaggccaatgagcaatctgtaacgccacagagacggagctgttttgaatcatcacctgaccctgagttgaaatctaggaccccttctagacatagctgctcagggtcctctcctcctagagtgaaatctagcacacctcccagacagagcccatctaggtcatcatctccacaacccaaagtgaaggcaataatatcaccaagacaaagaagccattctggctcctcttctccaagtcctagtagggtgacgtcgagaacaactccacggcgaagcagatcagtatctccctgctccaatgtggaatccagattgttgccaagatacagtcattctgggtcctcctcaccagataccaaagtgaaacctgaaacaccgccaagacaaagtcactcagggtctatttcaccataccccaaagtaaaggcccaaactccaccggggccaagtctttctggatcaaagtcaccatgtccccaagagaagtctaaagactcactagttcaaagttgccctggatccctctctctctgtgcaggagtaaaatctagcacaccaccaggcgagagctattttggtgtctcatctctgcaactgaaaggacaatctcaaacttcaccagaccacagatctgatacttcaagtccagaagtgagacagagtcattcagaatcaccatctctgcagagcaaatctcaaacatcacctaagggaggtcggtccaggtcttcatctccagtcactgagctggcatccagatctccaataagacaagatagaggtgagttctcagcgagtcctatgttgaaatctggaatgtctcctgagcagagcaggttccagtctgactcttcttcatatcctacagtggactcgaattctctcttggggcagagtagattggagactgctgaatcaaaagagaaaatggccttaccccctcaggaggatgctactgcatcacctcctagacagaaagacaaatttagtccctttccagtacaggataggcctgagtcttcactggtattcaaagacacacttagaaccccgccaagagaaagaagtggtgctgggtcatctccagaaacaaaagagcaaaatagtgcattgcctacgtcaagccaagatgaagagttaatggaggtggtagagaagtctgaagaacccgcaggccaaatcctgtctcatttgtcttcagaacttaaagaaatgtccacaagtaactttgaatcatctcctgaagtagaagaaaggcctgctgtgtctttgactcttgatcagagccagtcacaggcttctttggaagcagtagaagtcccttcaatggcctcatcttggggtgggccacatttttctccagaacataaagaactgtctaactccccactcagggagaacagctttggatcacctttagaatttagaaactcaggcccacttggtacagaaatgaatactggattttcttctgaggttaaagaagatttgaatggaccgtttcttaatcagctggaaacagatccatctctagacatgaaagaacaatcgacaagatcctctggacacagcagttctgagttatccccagatgcagtggaaaaggcagggatgtcttcaaatcagagcatctcttcacctgtgcttgatgctgtacccagaacaccctcgagagaaagaagtagttctgcatcttctcctgaaatgaaagatggtttacccagaactccatcaaggagaagcaggtctgggtcttctccaggacttagagatgggtctgggactccctcgaggcacagcctgtctgggtcctctcctggaatgaaagatatacctagaacgccatttagagggagaagcgaatgtgattcttccccagaaccgaaagctttgcctcagactcctaggccgaggagtcgttctccatcatccccagagctcaacaacaagtgtcttaccccccagagagaaagaagcgggtcagaatcatcagttgatcagaaaactgtggctcggactcccctggggcagagaagtcgttcgggatcctctcaagaacttgatgtgaaacccagtgcatcccctcaggaaagaagtgagtcagactcttctccagattctaaagccaagacacgaaccccacttcggcagaggagtcggtctggatcatctccagaggttgacagcaaatctcgactatcccctcggcgcagtaggtctggttcctcccctgaagtgaaagataagccaagagcagcacccagggcacagagtggttctgattcctctcctgaacctaaagctccagcccctcgggcccttcccagacgaagcagatcaggttcatcaagcaaaggcagaggcccttctcctgaaggaagcagcagtaccgagtcctctcctgaacatccgcccaaatccagaactgctcgcagaggttccaggtcatcaccagagcccaagaccaagtctcgtacaccacctcgacgtcgcagctctcgatcatctccggagctaacaaggaaggccagactgtcccgtagaagccgctctgcctcatcctcaccagaaactcgctctagaactcccccaaggcaccggagaagtccctcagtgtcttccccggagccagccgaaaaatcgaggtcttcacgccgacggcgctcagcttcatctccacgcactaagacaacctcaaggagaggccgctctccttcgccaaagcctcgtggactccagaggtcccgttcccgctcaaggagagagaaaacaagaacaacccgacgtcgagataggtctggatcttctcagtcaacctctcggcgaagacagcggagccggtcaaggtcgcgggttactcggcggcggaggggaggctctggttatcactcaaggtcacctgcccggcaggaaagttcccggacctcctctcgacgccgaagaggccgctctcggacacccccaaccagtcggaagcgttctcgctcacgcacatcaccagccccgtggaaacgctctagatctcgagcctctccagccactcaccggcgatccaggtccagaacccccctgataagccgacgtaggtccagatctcgaacttcaccagtcagccggagacggtcaaggtccaggacttcagtgactcgacgaagatcccggtcaagagcatccccagtgagcagaaggcgatccagatccagaacgccaccagtaacccgccgtcgttcaaggtctagaacgccaacaacacgccgccgctcccgttctagaactccaccagtgactcgcagaaggtccagatccaggactccaccagtaaccaggaggcgatctcgaagcagaacttcgcctatcactcgcagaagatcaagatccagaacatctccggtcacccgaaggagatctcgatctcgcacatctccagtaactcgaagaaggtcccgctctcgaacctcaccagtgacacgccgccgctctaggtcccggacacctccagctattcggcgccgctctagatctcgaacgccactgttaccacgcaaacgttctcgaagtcgctcaccacttgctatccgccgccgctccagatcccgtactccacgaacagctcggggtaaacggtccttaacaagatctcctccagccatccgcaggcgttctgcatctggaagtagttctgatcgttcacgatctgctactcctccagcaacaagaaatcattctggttcacggacacctccagtagcactcaacagttccagaatgagctgcttcagtcgtcctagcatgtccccaacacctcttgatcgctgcagatcacctggaatgcttgaaccccttggcagctctagaacacccatgtctgtcctgcagcaagccggcggctccatgatggatggtccaggtccccgaatacctgaccaccagagaacatctgtgccagaaaatcatgctcagtccaggattgcacttgccctgacagctatcagtcttggcaccgctcggcctcctccgtccatgtctgctgctggccttgctgcaagaatgtcccaggttccagccccggtgcctctcatgagtctcagaaccgcaccagcagccaaccttgccagcaggattcctgcagcctctgcggcagccatgaacctagccagcgccaggacacctgccattccaacagcagtgaacctggctgactctcgaacgccagctgcagcagcggccatgaacttggccagccccagaacagcggtggcaccttcggctgtgaacctggctgaccctcgcactcccacagccccagctgtgaacctagcaggggccagaaccccagctgccttggcagctctgagtctcacaggctctggcacaccaccaactgctgcaaactatccctccagctccagaacaccacaggctccagcctctgcaaacctggtgggtcctcggtctgcacatgccacagctcctgtgaatattgccggctccagaaccgccgcagccttggcccccgcgagcctcaccagtgctaggatggctccagcattgtctggtgcaaacctcaccagccccagggtgcccctttctgcctacgagcgtgtcagtggcagaacctcaccaccgctccttgaccgagctaggtccagaacaccaccgtctgccccaagccaatctaggatgacctctgaacgggctccctccccttcctctagaatgggccaggctccttcacagtctcttctccctccagcacaggatcagccgaggtctcctgtgccttctgctttttcagaccaatcccgttgtttgattgcccagaccacccctgtagcagggtctcagtccctttcctctggggcagtggcaacgaccacgtcctctgctggtgatcacaatggcatgctctctgtccctgcccctggggtgccccactctgatgtgggggagccacctgcctctactggggcccagcagccttctgcattagccgccctgcagccagcaaaggagcggcggagttcctcctcgtcgtcgtcgtcctctagctcctcctcctcttcatcatcgtcgtcgtcgtcctcctcctcctctggctccagttctagtgactcagagggctctagccttcctgtgcaacctgaggtggcactgaagagggtccccagccccaccccagccccaaaggaggctgttcgagagggacgtcctccggagccaaccccagccaaacggaagaggcgctctagcagttccagttccagctcctcctcttcatcttcctcctcctcctcctcctcctcttcttcctcctcctcttcctcttcttcttcttcctcctcatcttcctcctcctcgtcgtcttcctccccttcccctgctaagcctggccctcaggccttgcccaaacctgcaagccccaagaagccaccccctggcgagcggaggtcccgcagcccccggaagccaatagactccctcagggactctcggtccctcagctactcgcctgtggagcgtcgccgtccctcgccccagccctcaccacgggaccagcagagcagcagcagtgagcggggttcccggagaggccagcgtggggacagccgctcccccagccacaagcgcaggagggagacacctagccctcggcccatgagacaccgctcctccaggtctccataaattgtctttgggggattccaccacacccaatgctctggagccacaaggagtgtcccttcttccccagcagagccgtgggagggtccttgtctgctctcctttgaaccttggcagcccttggatggagggctccctttccctccccttttttttttctttgttcctgtgaaatgttaatctccgtgagttcttcctggttcatgtgttctggggggtttggggtgggagggaatgcagatgggagttgggggaggggaggatacagttcaggataccccagcctggagtcagggccagggaggcatggccccacttgtatccagaagttcccaggggtgattgtgatggtggttgggactggaggttgtataaggtgttcttggaaggaaggggcaggagttggaattagttggtccctactgtcccccatgaggttgtgaacccctccccccaacttttcatgtttcttaaaggcattttggttttttaaaatctgtacagcaagagcaactttttctgtcaaataaaaatgagaaatgcagg

SEQ ID NO: 305 - DNA, 2380 bp, Homo sapiens
tctccgcgtccagtgctgcttagaggtgctcgcgccgctctgctgctgctgctgccgccccggctcttagcccgaccctcgctcctcctccgccggtccctcagcgcggcctcctgcgccccgatctccttgcccgccgccgcctcccggagcagcatggacggcgcgggggctgaggaggtgctggcacctctgaggctagcagtgcgccagcagggagatcttgtgcgaaaactcaaagaagataaagcaccccaagtagacgtagacaaagcagtggctgagctcaaagcccgcaagagggttctggaagcaaaggagctggcgttacagcccaaagatgatattgtagaccgagcaaaaatggaagataccctgaagaggaggtttttctatgatcaagcttttgctatttatggaggtgttagtggtctgtatgactttgggccagttggctgtgctttgaagaacaatattattcagacctggaggcagcactttatccaagaggaacagatcctggagatcgattgcaccatgctcacccctgagccagttttaaagacctctggccatgtagacaaatttgctgacttcatggtgaaagacgtaaaaaatggagaatgttttcgtgctgaccatctattaaaagctcatttacagaaattgatgtctgataagaagtgttctgtcgaaaagaaatcagaaatggaaagtgttttggcccagcttgataactatggacagcaagaacttgcggatctttttgtgaactataatgtaaaatctcccattactggaaatgatctatcccctccagtgtcttttaacttaatgttcaagactttcattgggcctggaggaaacatgcctgggtacttgagaccagaaactgcacaggggattttcttgaatttcaaacgacttttggagttcaaccaaggaaagttgccttttgctgctgcccagattggaaattcttttagaaatgagatctcccctcgatctggactgatcagagtcagagaattcacaatggcagaaattgagcactttgtagatcccagtgagaaagaccaccccaagttccagaatgtggcagaccttcacctttatttgtattcagcaaaagcccaggtcagcggacagtccgctcggaaaatgcgcctgggagatgctgttgaacagggtgtgattaataacacagtattaggctatttcattggccgcatctacctctacctcacgaaggttggaatatctccagataaactccgcttccggcagcacatggagaatgagatggcccattatgcctgtgactgttgggatgcagaatccaaaacatcctacggttggattgagattgttggatgtgctgatcgttcctgttatgacctctcctgtcatgcacgagccaccaaagtcccacttgtagctgagaaacctctgaaagaacccaaaacagtcaatgttgttcagtttgaacccagtaagggagcaattggtaaggcatataagaaggatgcaaaactggtgatggagtatcttgccatttgtgatgagtgctacattacagaaatggagatgctgctgaatgagaaaggggaattcacaattgaaactgaagggaaaacatttcagttaacaaaagacatgatcaatgtgaagagattccagaaaacactatatgtggaagaagttgttccgaatgtaattgaaccttccttcggcctgggtaggatcatgtatacggtatttgaacatacattccatgtacgagaaggagatgaacagagaacattcttcagtttccctgctgtagttgctccattcaaatgttccgtcctcccactgagccaaaaccaggagttcatgccatttgtcaaggaattatcggaagccctgaccaggcatggagtatctcacaaagtagacgattcctctgggtcaatcggaaggcgctatgccaggactgatgagattggcgtggcttttggtgtcaccattgactttgacacagtgaacaagaccccccacactgcaactctgagggaccgtgactcaatgcggcagataagagcagagatctctgagctgcccagcatagtccaagacctagccaatggcaacatcacatgggctgatgtggaggccaggtatcctctgtttgaagggcaagagactggtaaaaaagagacaatcgaggaatgaggacaattttgacaacttttgaccacttgcgctaataaaaaaaaaaaaactactcttatgtccactttacaaaagaaaacagcattgtgattactcccagggaccgtattttatcttcagtggctgcctgattttacccccacaattaaagttgaaggaatcctga

SEQ ID NO: 306 - DNA, 2000 bp, Homo sapiens
ggtatcgatgacgtggacattgacctccacatcaacatcagcttcctcgatgaggaagtctctacagcctggaaggtcctccggacagaacctattgtgttgaggctgcgattttctctctcccagtacctagatggaccagaaccatccattgaggttttccagccatcaaataaggaaggatttgggctgggtcttcagttgaaaaagatcctgggtatgtttacatcccaacaatggaaacatctgagcaatgatttcttgaagacccagcaggagaagaggcacagttggttcaaggcaagtggtaccatcaagaagttccgagctggcctcagcatcttttcacccatccccaagtctcccagtttccctatcatacaggactccatgctgaaaggcaaactaggtgtaccagagcttcgggttgggcgcctcatgaaccgctccatctcctgtaccatgaagaaccccaaagtggaagtgtttggctaccctcccagcccccaggcaggtctcctgtgccctcagcacgtgggcctccctcccccagcacggacctctcctttggtcagtggtcactgcaagaacattcccactctggagtatggattcctcgttcagatcatgaagtatgcagaacagaggattccaacattgaatgagtactgtgtggtgtgtgatgagcagcatgtcttccaaaatggatctatgctgaagccagctgtctgtactcgtgaactatgcgttttctccttctacacactgggcgtcatgtctggagctgcagaggaggtggccactggagcagaggtggtggatctgctggtggccatgtgtagggcagctttagagtcccctagaaagagcatcatctttgagccttatccctctgtggtggaccccactgatcccaagactctggcctttaaccctaagaagaagaattatgagcggcttcagaaagctctggatagtgtgatgtctattcgggagatgacccagggctcatatttggaaatcaagaaacagatggacaagttggatcccctggcccatcctctcctgcagtggatcatctctagcaacaggtcacacattgtcaaactacctctcagcaggctgaagttcatgcacacctcacaccagttcctcctgctgagcagccctcctgccaaggaggctcggttccggaccgccaagaagctctatggcagcacctttgccttccatgggtcccacattgagaactggcattcgatcctgcgcaatgggctggtcaatgcatcctacaccaaactgcagctgcatggagcagcctatggcaaaggcatctacctgagccccatctccagtatttcctttggatactcaggaatgggaaaaggacagcacaggatgccctccaaggatgagctggtccagagatacaacaggatgaataccatcccccagacccgatccattcagtcacggttcctgcagagtcggaatctaaactgtatagcactttgtgaagtgattacatctaaggacctccagaagcatgggaacatctgggtgtgccctgtgtccgaccatgtctgcacaagattcttctttgtatatgaggatggtcaggtgggcgatgccaacattaatactcaggaccccaagatacagaaggaaatcatgcgtgtgatcggaactcaggtttacacaaactgagggggccccagccctcgtaccacccctgttaccccaggatccatctgccctcataaaagtgttcaggtacagcagctgaggctgccctgaggaatcaaggggccattaccaaggggcaggaaaaggatatgtaagaggtggccttcatggtagagcttgacccaagaactactccacattcggatggcccagactgactccatcccctgactttccctttgacttcaccctgtttgtaaataaaacaataaaatggaaggtgctgtggactggaaaaaaaaaaaaaaaaaaaa

SEQ ID NO: 307 - DNA, 2268 bp, Homo sapiens
atggccagcgtccacgagagcctctacttcaatcccatgatgaccaatggggttgtgcacgccaatgtgttaggcatcaaggactgggtgacgccgtacaagatcgcggtgctggtgctgctgaacgagatgagccgcacaggcgagggcgccgtcagcctcatggagcggcggaggctcaaccagctgctcctgcccctgctgcagggcccagatattacactgtcaaaactttacaagttaattgaagagtcttgtccacagctggcaaattcagtgcagatcagaatcaaactgatggctgaaggcgagttgaaggatatggaacagttttttgatgacctttcagattctttctctggaactgaaccagaggttcacaaaacaagtgtagtaggtttgtttctgcgtcacatgatcttggcctacagtaagctttctttcagccaagtgtttaaactgtacactgcccttcagcagtacttccagaatggtgagaaaaagacagtggaggatgctgatatggaactgaccagtagagatgagggtgaaagaaaaatggaaaaagaagaacttgatgtatctgtaagagaagaggaggtatcttgcagtgggcctctgtcccaaaaacaagcagaattttttctttctcaacaggcttctttgctaaagaatgatgagactaaggccctcactccagcttccttgcagaaggaattaaacaatttgttgaaatttaatcctgattttgctgaagcgcattatctcagctacttaaacaacctccgtgtccaagatgttttcagttcaacacacagtctcctccattattttgatcgtctgattcttaccggagccgaaagcaaaagtaatggggaagagggctatggccggagcttgagatacgccgctctgaatcttgccgccctgcactgccgcttcggtcactatcaacaggcagagctcgccctgcaggaggcaattaggattgcccaggagtccaacgatcacgtgtgtctccagcactgtttgagctggctttatgtgctggggcagaagagatccgatagctatgttctgctggagcattctgtgaagaaggcagtacattttgggttaccgtacctcgcctccctgggaatacagtcccttgttcaacagagagcttttgctgggaagacggcaaacaagctgatggatgccctaaaggactccgacctcctgcactggaaacacagcctgtcagagctcatcgatatcagcatcgcacagaaaacggccatctggaggctgtatggccgcagcaccatggcactgcaacaggcccagatgttgctgagcatgaacagcctggaggcggtgaatgcgggcgtgcagcagaacaacacagagtcctttgctgtcgcactctgccacctcgcagagctacacgcggagcagggctgttttgctgcagcttctgaagtgttaaagcacttgaaggaacgatttccgcctaatagtcagcacgcccagttatggatgctatgtgatcaaaaaatacagtttgacagagcaatgaatgatggcaaatatcatttggctgattcacttgttacaggaatcacagctctcaatagcatagagggtgtttataggaaagcggttgtattacaagctcagaaccaaatgtcagaggcacataagcttttacaaaaattgttggttcattgtcagaaactgaagaacacagaaatggtgatcagtgtcctactgtccgtggcagagctgtactggcgatcttcctcccctaccatcgcgctgcccatgctcctgcaggctctggccctctccaaggagtaccggttacagtacttggcctctgaaacagtgctgaacttggcttttgcgcagctcattcttggaatcccagaacaggccttaagtcttctccacatggccatcgagcccatcttggctgacggggctatcctggacaaaggtcgtgccatgttcttagtggccaagtgccaggtggcttcagcagcttcctacgatcagccgaagaaagcagaagctctggaggctgccatcgagaacctcaatgaagccaagaactattttgcaaaggttgactgcaaagagcgcatcagggacgtcgtttacttccaggccagactctaccataccctggggaagacccaggagaggaaccggtgtgcgatgctcttccggcagctgcatcaggagctgccctctcatggggtacccttgataaaccatctctag

SEQ ID NO: 308 - DNA, 3176 bp, Homo sapiens
ggtggtggcggcggcgcaagggtgagggcggccccagaaccccaggtaggtagagcaagaagatggtgtttctgcccctcaaatggtcccttgcaatcatgtcatttctactttcctcactgttggctctcttaactgtgtccactccttcatggtgtcagagcactgaagcatctccaaaacgtagtgatgggacaccatttccttggaataaaatacgacttcctgagtacgtcatcccagttcattatgatctcttgatccatgcaaaccttaccacgctgaccttctggggaaccacgaaagtagaaatcacagccagtcagcccaccagcaccatcatcctgcatagtcaccacctgcagatatctagggccaccctcaggaagggagctggagagaggctatcggaagaacccctgcaggtcctggaacacccccctcaggagcaaattgcactgctggctcccgagcccctccttgtcgggctcccgtacacagttgtcattcactatgctggcaatctttcggagactttccacggattttacaaaagcacctacagaaccaaggaaggggaactgaggatactagcatcaacacaatttgaacccactgcagctagaatggcctttccctgctttgatgaacctgccttcaaagcaagtttctcaatcaaaattagaagagagccaaggcacctagccatctccaatatgccattggtgaaatctgtgactgttgctgaaggactcatagaagaccattttgatgtcactgtgaagatgagcacctatctggtggccttcatcatttcagattttgagtctgtcagcaagataaccaagagtggagtcaaggtttctgtttatgctgtgccagacaagataaatcaagcagattatgcactggatgctgcggtgactcttctagaattttatgaggattatttcagcataccgtatcccctacccaaacaagatcttgctgctattcccgactttcagtctggtgctatggaaaactggggactgacaacatatagagaatctgctctgttgtttgatgcagaaaagtcttctgcatcaagtaagcttggcatcacaatgactgtggcccatgaactggcccaccagtggtttgggaacctggtcactatggaatggtggaatgatctttggctaaatgaaggatttgccaaatttatggagtttgtgtctgtcagtgtgacccatcctgaactgaaagttggagattatttctttggcaaatgttttgacgcaatggaggtagatgctttaaattcctcacatcctgtgtctacacctgtggaaaatcctgctcagatccgggagatgtttgatgatgtttcttatgataagggagcttgtattctgaatatgctaagggagtatcttagtgctgacgcatttaaaagtggtattgtacagtatctccagaagcatagctataaaaatacaaaaaacgaggacctgtgggatagtatggcaagtatttgccctacagatggtgtaaaagggatggatggcttttgctctagaagtcaacattcatcttcatcctcacattggcatcaggaaggggtggatgtgaaaaccatgatgaacacttggacactgcagaagggttttcccctaataaccatcacagtgagggggaggaatgtacacatgaagcaagagcactacatgaagggctctgacggcgccccggacactgggtacctgtggcatgttccattgacattcatcaccagcaaatccgacatggtccatcgatttttgctaaaaacaaaaacagatgtgctcatcctcccagaagaggtggaatggatcaaatttaatgtgggcatgaatggctattacattgtgcattacgaggatgatggatgggactctttgactggccttttaaaaggaacacacacagcagtcagcagtaatgatcgggcgagtctcattaacaatgcatttcagctcgtcagcattgggaagctgtccattgaaaaggccttggatttatccctgtacttgaaacatgaaactgaaattatgcccgtgtttcaaggtttgaatgagctgattcctatgtataagttaatggagaaaagagatatgaatgaagtggaaactcaattcaaggccttcctcatcaggctgctaagggacctcattgataagcagacatggacagacgagggctcagtctcagagcgaatgctgcggagtcaactactactcctcgcctgtgtgcacaactatcagccgtgcgtacagagggcagaaggctatttcagaaagtggaaggaatccaatggaaacttgagcctgcctgtcgacgtgaccttggcagtgtttgctgtgggggcccagagcacagaaggctgggattttctttatagtaaatatcagttttctttgtccagtactgagaaaagccaaattgaatttgccctctgcagaacccaaaataaggaaaagcttcaatggctactagatgaaagctttaagggagataaaataaaaactcaggagtttccacaaattcttacactcattggcaggaacccagtaggatacccactggcctggcaatttctgaggaaaaactggaacaaacttgtacaaaagtttgaacttggctcatcttccatagcccacatggtaatgggtacaacaaatcaattctccacaagaacacggcttgaagaggtaaaaggattcttcagctctttgaaagaaaatggttctcagctccgttgtgtccaacagacaattgaaaccattgaagaaaacatcggttggatggataagaattttgataaaatcagagtgtggctgcaaagtgaaaagcttgaacgtatgtaaaaattcctcccttgccaggttcctgttatctctaatcaccaacattttgttgagtgtattttcaaactagagatggctgttttggctccaactggagatacttttttcccttcaactcattttttgactatccctgtgaaaagaatagctgttagtttttcatgaatgggctttttcatgaatgggctatcgctaccatgtgttttgttcatcacaggtgttgccctgcaacgtaaacccaagtgttgggttccctgccacagaagaataaagtaccttattcttctc

SEQ ID NO: 309 - DNA, 2059 bp, Homo sapiens
gcggccgccaagcgatccctgctccgcgcgacactgcgtgcccgcgcacgcagagaggcggtgacgcactttacggcggcacgtaagtgcgtgacgctcgtcagtggcttcagttcacasgtggcgccmgsasgmrggttgctgtgtttgtgcttccttctacagccaatatgaaaaggcctaagttaaagaaagcaagtaaacgcatgacctgccataagcggtataaaatccaaaaaaaggttcgagaacatcatcgaaaattaagaaaggaggctaaaaagcagggtcacaagaagcctaggaaagacccaggagttccaaacagtgctccctttaaggaggctcttcttagggaagctgagctaaggaaacagaggcttgaagaactaaaacagcagcagaaacttgacaggcagaaggaactagaaaagaaaagaaaacttgaaactaatcctgatattaagccatcaaatgtggaacctatggaaaaggagtttgggctttgcaaaactgagaacaaagccaagtcgggcaaacagaattcaaagaagctgtactgccaagaacttaaaaaggtgattgaagcctccgatgttgtcctagaggtgttggatgccagagatcctcttggttgcagatgtcctcaggtagaagaggccattgtccagagtggacagaaaaagctggtacttatattaaataaatcagatctggtaccaaaggagaatttggagagctggctaaattatttgaagaaagaattgccaacagtggtgttcagagcctcaacaaaaccaaaggataaagggaagataaccaagcgtgtgaaggcaaagaagaatgctgctccattcagaagtgaagtctgctttgggaaagagggcctttggaaacttcttggaggttttcaggaaacttgcagcaaagccattcgggttggagtaattggtttcccaaatgtggggaaaagcagcattatcaatagcttaaaacaagaacagatgtgtaatgttggtgtatccatggggcttacaaggagcatgcaagttgtccccttggacaaacagatcacaatcatagatagtccgagcttcatcgtatctccacttaattcctcctctgcgcttgctctgcgaagtccagcaagtattgaagtagtaaaaccgatggaggctgccagtgccatcctttcccaggctgatgctcgacaggtagtactgaaatatactgtcccaggctacaggaattctctggaattttttactatgcttgctcagagaagaggtatgcaccaaaaaggtggaatcccaaatgttgaaggtgctgccaaactgctgtggtctgagtggacaggtgcctcattagcttactattgccatccccctacatcttggactcctcctccatattttaatgagagtattgtggtagacatgaaaagcggcttcaatctggaagaactggaaaagaacaatgcacagagcataagagccatcaagggccctcatttggccaatagcatccttttccagtcttccggtctgacaaatggaataatagaagaaaaggacatacatgaagaattgccaaaacggaaagaaaggaagcaggaggagagggaggatgacaaagacagtgaccaggaaactgttgatgaagaagttgatgaaaacagctcaggcatgtttgctgcagaagagacaggggaggcacttctgaggagactacagcaggtgaacagtctacaaggtcttttatcttggataaaatcattgaagaggatgatgcttatgacttcagtacagattatgtgtaacagaacaatggctttttatgatttttttttttaacattttaagcagactgctaaactgttctctgtataagttatggtatgcatgagctgtgtaaattttgtgaatatgtattatattaaaaccaggcaacttggaatccctaaattctgtaaaaagacaattcatctcattgtgagtggaagtagttatctggaataaaaaaagaagatacctattgaaaaaaaaaaaaaaaaaaaaaa

SEQ ID NO: 310 - DNA, 2238 bp, Homo sapiens
cgttgccgggtcgcaggtcccgccagtgcgagcgcaacggaggtcgaaggcgttcagactcttagctgaacgcggagctgcggcggctatgctgtggagcggctgccggcgtttcggggcgcgcctcggctgcctgcccggcggtctccgggtcctcgtccagaccggccaccggagcttgacctcctgcatcgacccttccatgggacttaatgaagagcagaaagaatttcaaaaagtggcctttgactttgctgcccgagagatggctccaaatatggcagagtgggaccagaaggagctgttcccagtggatgtgatgcggaaggcagcccagctaggcttcggaggggtctacatacaaacagatgtgggcgggtctgggctgtcacgtcttgatacctctgtcatttttgaagccttggctacaggctgcaccagcaccacagcctatataagcatccacaacatgtgtgcctggatgattgatagcttcggaaatgaggaacagaggcacaaattttgcccaccgctctgtaccatggagaagtttgcttcctactgcctcactgaaccaggaagtgggagtgatgctgcctctcttctgacctccgctaagaaacagggagatcattacatcctcaatggctccaaggccttcatcagtggtgctggtgagtcagacatctatgtggtcatgtgccgaacaggaggaccaggccccaagggcatctcatgcatagttgttgagaaggggacccctggcctcagctttggcaagaaggagaaaaaggtggggtggaactcccagccaacacgagctgtgatcttcgaagactgtgctgtccctgtggccaacagaattgggagcgaggggcagggcttcctcattgccgtgagaggactgaacggagggaggatcaatattgcttcctgctccctgggggctgcccacgcctctgtcatcctcacccgagaccacctcaatgtccggaagcagtttggagagcctctggccagtaaccagtacttgcaattcacactggctgatatggcaacaaggctggtggccgcgcggctgatggtccgcaatgcagcagtggctctgcaggaggagaggaaggatgcagtggccttgtgctccatggccaagctctttgctacagatgaatgctttgccatctgcaaccaggccttgcagatgcacgggggctacggctacctgaaggattacgctgttcagcagtacgtgcgggactccagggtccaccagattctagaaggtagcaatgaagtgatgaggatactgatctctagaagcctgcttcaggagtagaacccacacttgttctggcctggtgttcagtgcgactgcagtcagtgttgagtggtgccatgtgggccgctctattccaaaggaatcatggattagacccaagggctgagctcctctagggcaggacctgcaccctgtgtgttggcaccagcatcgggtcttggactggggcagaatccccagtggaaccggaagagctggactgatgagaaacatcagaagaacacatactaccttgttttcctaatgccagaagggtgaccagtgaagattcaccgtcaaaccatgaaagtcctttcttggatccactttatcttgattagtctgcattttactagttcactggatccctcctctaggggcctggggactttcactgatgctcttcctgattctagagcaaaggtgtgggaaggggaaatggaggaatgccctcctgtctgtgtcgttctctgtgccacagctacagatgcagaaggtttctctggatagcacacctctgaatgtaaatcatgataaaatggatatttggaaacttactcctaagctgtgatgtagggtgtatttctacttctggactgcctcaatatcaagggctgagacttttgaatgttgaatattcgttgggtttcatgttaagacgcctgtggtccaggagtgctattcagtgtttctgttcctgataaacactttgaatatttttttgtgtttttgtttccttttctgaagctgttcctccttttaaatatttttaatcacattgataaaatctatccttcatccacctctggttctactatagttgatttttattttaaatgtttaattgtatttgattaaacacttaactggattttggaataataaaactctcgtccaatttggcttttaaaaaaaaaaaa

SEQ ID NO: 311 - DNA, 3334 bp, Homo sapiens
cggaggaggcccagagaccggagcgcggagacctcagccagcggcctacgcccaggcctttctccaccggaggaccagggaaccgcagtcttcatcacagaggtaccgtgctccgcgctccccgcctgacccggcccagcccgctgcggcggtgcctccttccttcctccttccctcgcgctctctctttcgcccgcccgcgccttccctgcccgcctgcgtcaccgcggccgccatggctgagaatggcgagagcagcggccccccgcgcccctcccgcggccctgctgcggcccaaggctcggctgctgccccggctgagcctaaaatcatcaaagtcacggtgaagactcccaaagagaaagaggagttcgcggtgcccgagaacagctcggttcagcagtttaaggaagcgatttcgaaacgcttcaaatcccaaaccgatcagctagtgctgatttttgccggaaaaatcttaaaagatcaagataccttgatccagcatggcatccatgatgggctgactgttcaccttgtcatcaaaagccagaaccgacctcagggccagtccacgcagcctagcaatgccgcgggaactaacactacctcggcgtcgactcccaggagtaactccacacctatttccacaaatagcaacccgtttgggttggggagcctgggaggacttgcaggccttagcagcctgggcttgagctcgaccaacttctctgagctccagagccagatgcagcagcagcttatggccagccctgagatgatgatccaaataatggaaaatccctttgttcagagcatgctttcgaatcccgatctgatgaggcagctgattatggctaatccacagatgcagcaattgattcagagaaacccagaaatcagtcacctgctcaacaacccagacataatgaggcagacactcgaaattgccaggaatccagccatgatgcaagagatgatgagaaatcaagacctggctcttagcaatctagaaagcatcccaggtggctataatgctttacggcgcatgtacactgacattcaagagccgatgctgaatgccgcacaagagcagtttgggggtaatccatttgcctccgtggggagtagttcctcctctggggaaggtacgcagccttcccgcacagaaaatcgcgatccactacccaatccatgggcaccaccgccagctacccagagttctgcaactaccagcacgaccacaagcactggtagtgggtctggcaatagttccagcaatgctactgggaacaccgttgctgccgctaattatgtcgccagcatctttagtaccccaggcatgcagagcctgctgcaacagataactgaaaacccccagctgattcagaatatgctgtcggcgccctacatgagaagcatgatgcagtcgctgagccagaatccagatttggctgcacagatgatgctgaatagcccgctgtttactgcaaatcctcagctgcaggagcagatgcggccacagctcccagccttcctgcagcagatgcagaatccagacacactatcagccatgtcaaacccaagagcaatgcaggctttaatgcagatccagcaggggctacagacattagccactgaagcacctggcctgattccgagcttcactccaggtgtgggggtgggggtgctgggaaccgctataggccctgtaggcccagtcacccccataggccccataggccctatagtcccttttacccccataggccccattgggcccataggacccactggccctgcagccccccctggctccaccggctctggtggccccacggggcctactgtgtccagcgctgcacctagagaaaccacgagtcctacatcagaatctggacccaaccagcagttcattcagcaaatggtgcaggccctggctggagcaaatgctccacagctgccgaatccagaagtcagatttcagcaacaactggaacagctcaacgcaatggggttcttaaaccgtgaagcaaacttgcaggccctaatagcaacaggaggcgacatcaatgcagccattgaaaggctgctgggctcccagccatcgtaatcacatttctgtacctggaaaaaaaatgtatcttatttttgataatggctcttaaatctttaaacacacacacaaaatcgttctttactttcattttgattcttttaaatctgtctagttgtaagtctaatatgatgcattttaagatggagtccctccctcctacttccctcactccctttctcctttgcttatttttcctaccttcccttcctcttgtctccccactccctccctctttgtttccttccttccttatttcctttagtttccttccttagccgtttttagtggtgggaatcaaatgctgtttcactcaaaagtgttgcatgcaaacacttctctttattctgcatttattgtgatttttggaaacaggtatcaaccttcacaggttgggtgcaacaagtgttgtcctacagatgtccaatttatttgcatttttaaacattagcctatgatagtaatttaatgtagaatgaagatattaaaaccagaagcaaattatttgaagccctctaatttgtggtacgatattgccttattgtgactttggcakgtatttttgctagcaaaatgctgtaagatttataccattgatcttttttgctatatttgtatacagtacagtaagcacaattggccctgtacatctaaaaatattacagtagaatctgagtgtaatatgtgtaaccaaaatgagaaagaatacaagaaatgtttctggagctagttatgtctcacaattttgtagaatcttacagcatctttgataaacttctcagtgaaaatgttggctaggcaagttcagttaaaacatagtacaaatgtttatcctggcatctctaagtacacatttaattgcacagaaaatttacagtgtaacattgcgtcaacatttgcagattgactgcatatgaccttaatctttgtgcagcctgaaggatcagtgtagtaatgccaggaaagtgctttttacctaagacttccttctcagcttctcccataaacagaccctaatatgcattttgatttgtaattggaaatgtaactttccctgaaagtgtcatgtgatgtttgcattacttttaactgctatgtataaaggaaagtgtgtcttttgacttcatcagttatttctcttgcgcccacagaaaaatgcattaaaaatgactaaaaaaaataaaaaattaaaaaatggaaaaaaaaaaaaaaaaaaaaaaa

SEQ ID NO: 312 - DNA, 1701 bp, Homo sapiens
ggaacaaaagctggagctccaccgcggtggcggccgctctagaactagtggatcccccgggctgcaggaattcggcacgagcagaagagggggctagctagctgtctctgcggaccaggggagaccccgcgcccccccggtgtgaggcggcctcacagggccgggtgggctggcgagccgacgcggcggcggaggaggctgtgaggagtgtgtggaacaggacccgggacagaggaaccatggctccgcagaacctgagcaccttttgcctgttgctgctatacctcatcggggcggtgattgccggacgagatttctataagatcttgggggtgcctcgaagtgcctctataaaggatattaaaaaggcctataggaaactagccctgcagcttcatcccgaccggaaccctgatgatccacaagcccaggagaaattccaggatctgggtgctgcttatgaggttctgtcagatagtgagaaacggaaacagtacgatacttatggtgaagaaggattaaaagatggtcatcagagctcccatggagacattttttcacacttctttggggattttggtttcatgtttggaggaacccctcgtcagcaagacagaaatattccaagaggaagtgatattattgtagatctagaagtcactttggaagaagtatatgcaggaaattttgtggaagtagttagaaacaaacctgtggcaaggcaggctcctggcaaacggaagtgcaattgtcggcaagagatgcggaccacccagctgggccctgggcgcttccaaatgacccaggaggtggtctgcgacgaatgccctaatgtcaaactagtgaatgaagaacgaacgctggaagtagaaatagagcctggggtgagagacggcatggagtacccctttattggagaaggtgagcctcacgtggatggggagcctggagatttacggttccgaatcaaagttgtcaagcacccaatatttgaaaggagaggagatgatttgtacacaaatgtgacaatctcattagttgagtcactggttggctttgagatggatattactcacttggatggtcacaaggtacatatttcccgggataagatcaccaggccaggagcgaagctatggaagaaaggggaagggctccccaactttgacaacaacaatatcaagggctctttgataatcacttttgatgtggattttccaaaagaacagttaacagaggaagcgagagaaggtatcaaacagctactgaaacaagggtcagtgcagaaggtatacaatggactgcaaggatattgagagtgaataaaattggactttgtttaaaataagtgaataagcgatatttattatctgcaaggtttttttgtgtgtgtttttgtttttattttcaatatgcaagttaggcttaatttttttatctaatgatcatcatgaaatgaataagagggcttaagaatttgtccatttgcattcggaaaagaatgaccagcaaaaggtttactaatacgtctccctttggggatttaatgtctggtgctgccgcctgagtttcaagaattaaagctgcaagaggactccaggagcaaaagaaacacaatatagagggttggagttgttagcaatttcattcaaaatgccaactggagaagtctgtttttaaatacattttgttgttattttt

SEQ ID NO: 313 - DNA, 5956 bp, Homo sapiens
ggggagaacacttctttgtctgggattccaaccagctctgtccttagcttgtctctgcctagcagtgttgcccaaagtaattttccacaaggttctggtgcttccgaaatggtttctaatcagcctgctaatttgctggttcaaccaccatcccagccagttccagagaacttggttccagaaagtcaaaaggatcgtaaggcaggaagtgctcttcccggatttgctaatagccctgctggaagcacaagtgtggtgttagttccacctgcacacggcaccctggtgcctgatggtaataaggcaaaccattccagtcatcaggaagacacttacggagccctagactttgccttaagcaggactttggaaaatcctgtaaacgtgtacaacccgtcccattctgacagcctcgcttctcagcaaagtgttgccagtcatcccagacaatctgggcctggggcgcctaaccttgaccgtttttatcagcaggtcacgaaagatgcccagggccagcctggcctcgaaagagcccagcaggagctggcgccaccccagcaacaggcttctcccccacaactacccaaagccatgttttcggagctgtcaaatccagaaagtctgcccgcacagggacaggcccagaactcagcacagtcaccagcaagtctggttctggtcgacgcgggtcagcagctgccccctcggcctcctcagtcctctagcgtgtctctggtgtccagtggctccggccaggcagctgtgccgtcagagcagccgtggccacagccagtgcctgcacttgcccccggcccaccgcctcaggacctggccgcctactactactaccggcctttgtacgatgcctaccagcctcagtactctttgccgtacccaccggagcctggcgcagcctccctctattaccaggatgtctacagcctctatgagcctcgatacaggccctatgatggtgctgcgtctgcttacgcccagaactaccgctatcccgagcccgagcggcccagctcccgagccagccactcctcggaacggccacctcccaggcaaggatatcctgaaggatactatagttccaaaagtggatggagcagtcagagcgattactatgcaagctattactccagccagtacgattatggagatccaggtcactgggatcgttaccactacagtgctagagtcagggacccccgcacctatgaccggaggtattggtgtgatgcagagtatgacgcatacaggagagagcactctgccttcggggacaggcccgagaaacgtgacaacaactggaggtacgatcctcgcttcacggggagttttgacgatgaccccgatccgcacagagacccttatggggaagaggtggaccggcgcagcgtccacagcgagcactcggcacggagcctgcacagcgcacacagcctggccagccgccgcagcagcctcagctcccactcgcaccagagtcagatttacagaagccacaatgtggctgccggttcctacgaggccccgcttcctccaggctcctttcacggcgattttgcctacggcacctaccgcagcaatttcagcagtggccccggcttcccagagtatggctaccctgccgacaccgtctggcctgccatggagcaagtttcatcaagaccaacttctcctgaaaaattttcagtgcctcatgtctgtgccaggtttggccctggcggtcagcttatcaaagtgattcccaatctgccttcagaaggacagccggccttggtggaggtccacagcatggaggccttgctgcagcacacgtctgagcaggaggagatgcgggcgttcccgggacccctggccaaagacgacacccataaggtggatgtcattaattttgcacagaacaaagctatgaaatgtttgcagaatgaaaacttaattgacaaagagtctgcaagtcttctttggaattttattgttctcttatgcagacaaaatgggaccgtggtagggaccgacattgcggagcttctgttacgagaccacagaacagtgtggcttcctgggaagtcgcccaatgaagcaaacctgattgatttcacgaatgaggcagtggagcaggtggaagaggaggagtctggtgaggcccagctctctttcctcactggtggtccggcggctgccgccagctcgctcgagagagagaccgagaggttcagggagctgttgctgtatggccgtaagaaggatgctttggagtctgcaatgaagaatggcctgtggggtcacgctctgctacttgcaagtaagatggacagccggacacacgcccgagtcatgaccaggtttgctaacagcctcccaatcaacgaccctctgcagacagtctaccagctcatgtccggacggatgcctgccgcgtccacgtgctgtggagacgagaaatggggagattggaggccgcacctcgccatggtcttgtccaacttgaacaacaacatggacgtcgagtccaggacgatggctaccatgggcgacactctggcttcaaggggcctcttggatgcggcccacttctgctacctcatggcccaggcgggatttggtgtttacacgaagaaaactacaaagcttgtcttaatcggatccaatcacagtttgccattcttaaagttcgcaaccaacgaagcaatccagaggacggaagcctatgagtacgcccagtccctgggtgccgagacctgccccctgcctagtttccaggtgtttaagttcatctactcctgccgcctggcggaaatggggctggccacgcaagccttccactactgtgaggccatcgcgaagagcatcctgacgcagccgcacctgtattccccggtgttgatcagccagcttgtgcagatggcttcccagttacgactcttcgatccccagctgaaagagaagccagaagaggagtccttggccgcacccacgtggctggttcacctgcagcaggtggagcggcagattaaggagggggctggagtatggcatcaggatggagccctcccgcagcagtgtcctggcactccgagttccgagatggagcagttggacaggccaggactcagtcagccaggagccctggggatcgccaaccctctgctggcggtgcctgcaccgagccctgagcactcgagcccgagcgtgcggctgctgccctcagctccgcagacgctccctgacggcccattggccagtcctgccagagtgccgatgttcccagtgccactgcccccggggcccctggagccgggtcctggctgtgtgaccccagggcctgcacttggcttcctggagccctccgggcctggcctcccacctggtgtgccacctctgcaggaaaggagacacttgctccaggaagccaggagcccagacccagggatagtgccgcaggaggcgcctgttggaaactcactttccgagctaagcgaagaaaattttgatggaaaatttgctaatctgaccccctcgaggacggtgccagactcggaggcccccccagggtgggatcgtgccgactcgggtcccacgcagccacctctgtctctctcacccgctcccgaaacaaagagacccggacaggcagccaagaaagaaacgaaggaacctaagaagggtgaatcctggttctttcgttggctacctggaaagaaaaagacagaagcttatttgccagatgacaagaacaaatcgattgtttgggatgaaaagaaaaaccagtgggtgaatttaaatgagccagaagaggagaagaaagccccgcccccacctccaacctcgatgcccaagactgtgcaagctgccccgcctgccctcccagggcctcctggagcccccgtgaacatgtactctagaagagcagcaggaaccagagctcgctacgttgacgtcctgaacccaagcgggacccagcggagcgagccggctctcgctcctgcggactttgtcgctccactcgcgccactcccaattccttctaacttgttcgtgccaaccccagatgcagaagaaccacagcttccagacgggactggcagggaagggcctgcagcagctaggggcctggccaatccagagcctgccccagagcccaaggctcctggcgacctccctgctgcagggggccctcccagcggggccatgcccttctacaaccctgctcagctggcacaggcctgcgccacctccgggagctcaaggctagggaggattggccagaggaagcacctggtgctgaactaggcttgccctgctgtgaacttgcacttggagccctgacgctgctgttctccccgaagaacccgaccgacctccgcgatctccgtcccgcccccagggagacacagcagtgactcagagctggtcgcacactgtgcctccctcctcaccgcccatcgtaatgaattattttgaaaattaattccaccatcctttcagattctggatggaaagactgaatctttgactcagaattgtttgccgaaaagaatgatgtgactttcttagtcatttaggatgatttaaggatatagtattcctggtcatttaagaatgttcattcattgaagccggagctgtctctgccacgggagagccacatggtcggtagtaaccagggcctctccaagcccagctgtgagtcactgcccagtgagtcccgcgcttcctttaaggtgctgggagcaaagagagggtgactgaggcagaccccaacccctgctctgcaccatctgggccctcgccgtgtttgaacctggctgaatgagtggagggcgctgtgttctcaatcagcgcctccgaggagccgtggggttccttcggcattagttcacggtttttgagagaggccctagttactgcagtgaatttctttcctgttgcagagacgcttccagcctcactttactttctgtggcctgatgaggaccatgggtgattttgtgtacccaaagcgctggggactgcccaccgtgtggcccagtcactgggaaggagccccagagagccggctgtctgacatgatggctcagggtggtcatccaggttgaaaactgaccgtgtgatgtttgatttgggcttcatttcgtgtgtaggagcacggttagactcactgttaaggaagctggatgcacttctctaaaaggctgcactttccgtgagcacttttcgtggtacaatccacatgacccactttctcccctgggggacgttggttcagaggttggtagcacttggggagagtatcttaacacagtttcttgacagcagctctggaacttagtatttctgccccgagttttgccacactgagactttgagtagctcctggtggactcaaccctgttcaactcagagacgggcctcctctcactgatgcaaagctttaaggcttctctgactgttctgaaactcttcgtattcttgtcaagtctaaagagactgaagaaaagatttaaatactaataaaaatcagtagataatttctgtaggttctgctggaggaatacaaactgtttggtgttttaaatttaagtgtagaaattgtagaatgtggaattagcacagatccttcctggctttctgtttcacttgatcatttagcccagaccacccaggatgttttccaaaatgttccacaggcgtgtcccgctggatccatttgtccttgtcacttggagaaaggccagtccctgtgacggggcagccctctctgtccctcggtcagctcgtgtgaatcctgggacctcttccggtcggctctgcccgctgttctggggtcgactgccacgacttttgattcaagaagcttcctccaggcgggagcggctatttttcctaaatgagaattgttacattgcaaattgttgaataaaatattttgcgctccttcaagcac

SEQ ID NO: 314 - DNA, 4073 bp, Homo sapiens
gctgggcagtgcccatgctgggatgtgctgctgctgtggctgctgcccgctgctggcccacctagagcaggggtcacttcgagagaggacccgggaaaaggagaagatgaaggaagccaaggatgcccgctataccaatgggcacctcttcaccaccatttcagtttcaggcatgaccatgtgctatgcctgtaacaagagcatcacagccaaggaagccctcatctgcccaacctgcaatgtgactatccacaaccgctgtaaagacaccctcgccaactgtaccaaggtcaagcagaagcaacagaaagcggccctgctgaagaacaacaccgccttgcagtccgtttctcttcgaagtaagacaaccatccgggagcggccaagctcggccatctacccctccgacagcttccggcagtccctcctgggctcccgccgtggccgctcctccttgtctttagccaagagtgtttctaccaccaacattgctggacatttcaatgatgagtctcccctggggctgcgccggatcctctcacagtccacagactccctcaacatgcggaaccgaaccctatccgtggaatccctcattgacgaagcagaggtaatctacagtgagctgatgagtgactttgagatggatgagaaggactttgcagctgactcttggagtcttgctgtggacagcagcttcctgcagcagcataaaaaggaggtgatgaagcagcaagatgtcatctatgagctaatccagacagagctgcaccatgtgaggacactgaagatcatgacccgcctcttccgcacggggatgctggaagagctacacttggagccaggagtggtccagggcctgttcccctgcgtggacgagctcagtgacatccatacacgcttcctcagccagctattagaacgccgacgccaggccctgtgccctggcagcacccggaactttgtcatccatcgcttgggtgatctgctcatcagccagttctcaggtcctagtgcggagcagatgtgtaagacctactcggagttctgcagccgccacagcaaggccttaaagctctataaggagctgtacgcccgagacaaacgcttccagcaattcatccggaaagtgacccgccccgccgtgctcaagcggcacggggtacaggagtgcatcctgctggtgactcagcgcatcaccaagtacccgttactcatcagccgcatcctgcagcattcccacgggatcgaggaggagcgccaggacctgaccacagcactggggctagtgaaggagctgctgtccaatgtggacgagggtatttatcagctggagaaaggggcccgtctgcaggagatctacaaccgcatggaccctcgggcccaaaccccagtgcctggcaagggcccctttggccgagaggaacttctgaggcgcaaactcatccacgatggctgcctgctctggaagacagcgacggggcgcttcaaagatgtgttagtgctgctgatgacagatgtactggtgtttctccaggaaaaggaccagaagtacatctttcctaccctggacaagccttcagtggtatcgctgcagaatctaatcgtacgagacattgccaaccaggagaaagggatgtttctgatcagcgcagccccacctgagatgtacgaggtgcacacagcatcccgggatgaccggagcacctggatccgggtcattcagcagagcgtgcgcacatgcccatccagggaggacttccccctgattgagacagaggatgaggcttacctgcggcgaattaagatggagttgcagcagaaggaccgggcactggtggagctgctgcgagagaaggtcgggctgtttgctgagatgacccatttccaggccgaagaggatggtggcagtgggatggccctgcccaccctgcccaggggccttttccgctctgagtcccttgagtcccctcgtggcgagcggctgctgcaggatgccatccgtgaggtggagggtctgaaagacctgctggtggggccaggagtggaactgctcttgacaccccgagagccagccctgcccttggaaccagacagcggtggtaacacgagtcctggggtcactgccaatggtgaggccagaaccttcaatggctccattgaactctgcagagctgactcagactctagccagagggatcgaaatggaaatcagctgagatcaccgcaagaggaggcgttacagcgattggtcaatctctatggacttctacatggcctacaggcagctgtggcccagcaggacactctgatggaagcccggttccctgagggccctgagcggcgggagaagctgtgccgagccaactctcgggatggggaggctggcagggctggggctgcccctgtggcccctgaaaagcaggccacggaactggcattactgcagcggcaacatgcgctgctgcaggaggagctacggcgctgccggcggctaggtgaagaacgggcaaccgaagctggcagcctggaggcccggctccgggagagtgagcaggcccgggcactgctggagcgtgaggccgaagaggctcgaaggcagctggccgccctgggccagaccgagccactcccagctgaggccccctgggcccgcagacctgtggatcctcggcggcgcagcctccccgcaggcgatgccctgtacttgagtttcaaccccccacagcccagccgaggcactgaccgcctggatctacctgtcactactcgctctgtccatcgaaactttgaggaccgagagaggcaggaactggggagccccgaagagcggctgcaagacagcagtgaccctgacactggcagcgaggaggaaggtagcagccgtctgtctccgccccacagtccacgagactttaccagaatgcaggacatcccggaggagacggagagccgcgacggggaggctgtagcctccgagagctaagggggcccctcccccctgccccgtgccccactgaagaacattactgagggggctaaccttggggactccaatttgccaatgatgagggaacatttgaaagaactgcaaattgtccttgccagctcttgggatccttggatacctggggccatttaagaagctaggggaattaggccacaacaccccctgggacatccgaaagctacaccacagatgccagtggttcatgccttcttcccgcaactttaggaaaatttatttatttattgtttattagttatggggggagaggggagatttaaaggaccagggacatgggaaccaagccatagggatcagagggccttgtccttgaacactactggggtatattcaggctcatccacgcagctgctgggttcttgccctaacggccctcccctgcaacatccgtcttggaggagaggctgcagccacagcaccctactgccctttaaataaaggagggctgtgggcagggccatgtccctttctcctctcccctcaacctcttactgctgttctccctttctccgtccttcatggaagccctgggagataacctggcttcctggagttgatggaataaaggttggggtggccataatggtttgttgggggtgagggaaaaaacccacagggaccagaatgttttgttgttcttttgttttcttttttgtaccaaagtcaactgcacgtgttttatatttttaagagatcgtaggcaattagagatcgaagcctcctatctccacatctctgaagaagttgaggggtgggggagagaatgacttctgccttcatctgcagtaacggggggacctatactgacctcttccccagccatttagaaacaagttctagggtgggttggaaaatctccaagagccctgacctcatcttccacctcagcaaccatgacctgaaacctcagcgtgaatttgggggatttttcagtggaacccttgcccccaaatgtcgaccagcccccaaatgtcgaagaattttcttcttgccaattttgttgtttaaaaaaaaaattcagggaaaattaaaaacctggaactcc

SEQ ID NO: 315 - DNA, 6948 bp, Homo sapiens
ggggctgaaagacacacagaagtcttcatggatatagttgatacatttaatcatttaattcctactgaacacttagatgatgccctatttctaggatccaacctggagaatgaagtctgtgaggattttagtgcaagtcaaaatgtcttagaggactcgctgaagaacatgctcagcgataaggatcctatgctaggatctgcaagtaaccagttctgtttgcctgttttggatagcaatgatcccaatttccagatgccttgttcaacagttgttggtcttgacgatattatggatgaaggagttgttaaagaaagtggcaatgataccattgatgaagaagaactgattttacctaacaggaacttaagggacaaggtagaagaaaattcagtgagatctccaagaaaatcacctcgtttaatggcacaagaacaagtaagaagtttgcgacagagcactattgccaagcgttcaaatgcagcaccattaagtaacacaaaaaaagcatctgggaagactgtatctactgctaaagcaggagtgaaacaaccagaaaggagtcaggttaaagaagaagtatgtatgtcactgaaacctgagtaccataaggagaatagaaggtgcagccgaaatagcggacaaattgaagtggtacctgaagtatcagtgtcttcaagtcattcttcagtgtcatcttgtcttgaaatgaaggatgaagatggattagattctaagcataagtgtaataatccgggagaaatagatgtgccatctcatgaattaaattgttcacttctttcagagacttgtgttactattggagaaaagaaaaatgaagctttgatggaatgtaaagccaagcctgttggtagtccattgtttaagttttcagataaagaagaacatgaacaaaatgattccatttcaggtaaaacgggtgagactgttgttgaagaaatgatagcaacaagaaaagttgaacaagattcaaaggagacagtaaaattatcccatgaagatgaccatattcttgaggacgctggatcttctgatatttctagtgatgctgcttgtacaaatccaaataagacagaaaacagccttgtaggtttgcctagttgtgtagatgaagtgactgaatgtaatttggaattgaaggataccatgggtattgctgataaaactgagaacacccttgaaagaaataaaattgaaccgttgggttattgtgaagatgcggagtctaataggcagttggagagcactgagtttaataaatcaaacttagaggtggttgatactagtacttttggaccggaaagtaatatcttggaaaatgctatttgtgatgtgcctgaccaaaattcaaaacagttgaatgctatagaaagtactaaaatagagtcccatgaaacagcaaaccttcaggatgacagaaacagccagtcaagtagcgtttcttacttagagtcaaaaagtgtaaaatccaaacatacaaaacctgtaattcattctaagcaaaacatgaccacagatgctccgaagaaaattgttgcagcaaagtatgaagtaatacatagcaaaactaaagttaatgtcaaaagtgtgaaacgaaatactgatgtaccagaatctcagcaaaattttcataggccagtcaaagtcagaaaaaaacaaattgataaggagccaaagattcagagttgcaattctggggttaaatctgtgaaaaaccaagctcattctgtactgaaaaaaacattacaggatcaaactttagtacaaattttcaagcccttaactcattctttgagtgataagtcacacgctcatcctggttgcttgaaagaacctcatcatcctgcacaaactggacatgtatcacattctagccagaaacagtgtcataagcctcagcaacaggccccagcaatgaaaaccaatagtcacgtgaaggaagagcttgaacacccaggcgttgagcattttaaggaagaggataaactgaaactgaaaaaacctgagaagaacctacaaccccgccaaagaagaagcagcaaaagtttttctttagatgagccaccattgttcattccagataacatagctaccataagaagagaaggctctgatcatagctcctcatttgaaagcaaatatatgtggactcccagcaagcagtgtgggttttgcaaaaaaccacatggcaacaggtttatggttggctgtgggagatgtgatgactggtttcatggtgattgtgttgggttaagtctttctcaagcacagcagatgggcgaggaagacaaagaatatgtctgtgtaaaatgttgtgctgaagaagacaaaaagactgaaatactagatccagatactttggaaaaccaagctacagttgaattccatagtggagataaaacaatggagtgtgaaaagcttggattatcaaaacacacaacaaatgatagaaccaaatatatagatgatacagtgaagcacaaggtcaaaattttaaaacgggagtctggtgaaggcagaaattcatcagactgtagagataatgaaattaaaaaatggcagctagctcctcttcgtaagatgggacaaccagttttacctcggagatcctcagaagaaaaaagtgaaaaaataccgaaagagtctacaactgttacttgcacaggagaaaaagcttcaaaaccaggtactcatgagaagcaagagatgaaaaagaagaaagttgaaaaaggagtgcttaatgtacatcctgctgcttctgcttccaagccttctgcagatcagatcaggcaaagtgtcagacattctctcaaagacattcttatgaagagacttacagactcaaatttgaaggtaccagaggaaaaggcagcaaaagttgccacaaaaattgagaaagagcttttctctttttttcgggacacagatgctaaatataagaacaaatatagaagtttgatgtttaatttgaaagatcctaaaaacaatatattatttaaaaaagtactgaaaggagaagtaactcctgatcatcttatcagaatgagtccagaagaactagcttctaaagagttagctgcttggagacgaagagaaaacagacataccatagaaatgattgagaaagagcagagagaagtggaacgacggccaatcaccaaaataactcataaaggtgaaatagaaattgagagtgatgccccaatgaaagaacaggaagcagccatggagattcaggaaccagccgccaataagtcattggagaagccagaaggatctgaaaaacaaaaagaggaggttgactctatgtctaaagataccactagtcaacacagacagcatctttttgatctcaactgcaaaatctgcataggtcgaatggcaccacctgtagatgatctttctccaaaaaaagtaaaagttgttgtaggagtagctcgcaaacattcagacaatgaagcagaaagtatagcagatgcattatcttcaacctcaaatattttggcttctgaattctttgaggaggagaaacaggagtctccaaagtcaacgttctctcctgctccacgtccagagatgcctggaactgttgaagttgagtctacctttctggctcgattgaacttcatctggaaaggttttatcaacatgccttctgtggcaaaatttgttaccaaagcctatccagtatctggctccccagaatacctgacagaggacctaccagatagtattcaagtaggtggcaggatatcacctcagacagtttgggattatgtggaaaaaataaaagcatcaggaaccaaggaaatttgtgtggttcgcttcacaccagtaactgaagaagatcaaatttcttatactttgctctttgcatacttcagtagcagaaagcgctatggagtagctgctaacaacatgaagcaggttaaagatatgtaccttattcctttgggtgccacagataaaattccacaccctcttgtgccttttgatggacctgggcttgaactgcatagacctaatctattgttgggcttaattattcgtcagaaactgaagcgacagcacagtgcctgtgctagtactagtcatatagctgagactcctgaaagtgcaccaccaatagcattgccacctgataaaaaaagtaaaatagaagtttctacagaagaagcaccagaggaagaaaatgacttttttaattcttttacaactgtattacacaagcagagaaataaacctcagcagaatcttcaggaagaccttccaacagcagttgaacctttaatggaagtcaccaaacaggagccaccaaaacctttaagatttcttcctggcgtgttgattggctgggagaatcaacctactactctggaattagcaaataaacctcttcctgtggatgatatacttcaaagccttttgggcaccactggtcaagtatatgaccaggcccagtcagtgatggaacaaaacactgttaaagaaattccatttttaaatgagcagaccaactcaaaaatagagaaaacagataatgtggaagtaactgatggtgaaaacaaggagataaaagttaaagtagataatatttcagaatctacagataagtcagcagaaatagaaacatcagtagtagggtcctcttccatttctgcagggtctttgacgagtcttagtctcagaggtaagccaccagatgtttctacagaagcatttttaacaaatttatcaattcagtcaaaacaagaggaaactgtggagagtaaagagaaaacattaaaaagacagcttcaggaagatcaagagaataatttgcaagataaccagacttcaaatagttctccatgcagatctaatgtaggaaaaggaaacatagatggtaatgtgagctgtagtgaaaaccttgttgctaatacagcgaggtctccacagtttatcaacctgaaaagggatcctaggcaagcagcaggacgaagtcagcctgtaactacttcagaaagcaaagatggagatagttgccggaatggagaaaaacacatgctgcctggcctgtcacacaacaaggagcacttaacagaacaaatcaatgtagaggaaaagttgtgttctgcagagaaaaactcgtgtgttcagcagagtgacaatttaaaagttgcacaaaactcaccatcagtagaaaacatacagacttctcaagcagaacaagcaaaacccttacaggaggatattttaatgcaaaatattgaaactgtgcacccatttcgaagaggatcagcagtagcgacatctcattttgaagttggaaacacatgtccatcagaatttccttctaaaagcatcacctttacttccagaagcaccagccccagaacaagtacaaacttttcacccatgaggccacagcagcccaaccttcagcatctcaagtctagcccacctggatttccatttccagggcctcctaattttcccccacaaagcatgtttggatttccaccacatttgccacctccattacttccccctccaggctttggctttgctcaaaatcccatggttccctggccacctgttgttcatctcccaggtcagccacagcgtatgatgggtcctctctcacaagcatcaaggtatataggcccgcagaatttttaccaggttaaagacattcggaggccagaaaggcgccatagtgacccttggggtaggcaagaccaacagcaactggataggccatttaataggggtaaaggggaccgccagagattttatagtgattcacaccatttgaaaagagagcgacatgaaaaggaatgggagcaagaatctgaaaggcatagacgcagagacagaagccaagacaaggacagagacagaaaaagcagggaggaagggcacaaagataaagagagggcacggttatcacatggtgatcgaggaacagatggaaaagcaagcagagatagtaggaatgtagacaagaagccagataaacctaaaagtgaagactatgagaaggacaaagaacgagagaaaagtaaacacagagaaggagaaaaggacagggataggtaccacaaagatagggaccacactgacagaactaaaagcaaaaggtaaaatttgcaggctgcttcaggattacatttaaataactgttaaaatgttgtatcttgtaaacaaaagaaagattgcctgctaggattgtgccatctttaaaatttttactattggtcatttgcagaacagtaaattctgtgtgttggtacagagtgctctgtaccagtgctcatcatcccttcttcataccaacggtccctagttataggaatttaatatttttaaaagttttacattgctgtatattcaaagatttgttttattaatatgcaataaaggcttagaaattttagttttattccttaattggtaaatatggttaactatggaatatatttacttcctctagtgaatgtcctttatataatgactaatttgggagtaatgtgtgctctgtaagtttgttttaaattgcactgtttttaaagaaactgtagaggagcaacaaaaatccaagcaacttcataatcagattatgctaatcatttagttgagcagtttttgaccaagaatcagaagcccaaggggtacatttattgctttaatctgcactcattgaagtcatttattaccatatactacagctttgtggtaggccattattttcattttcatttttggctcttcagaaacttgaatacttaagcttgtacatgatcttgtgttttgctatcctttttactgtaaaatgtaaatattttaagggatattttgattctaaatatgataaaataatttctcacctattttgtgtgtgtgacttgaaattcagtagtaaaagaatttcttctttaaagcttt

SEQ ID NO: 316 - DNA, 8213 bp, Homo sapiens
cccccagcagaagggcgcgacggctgcaacatcagcggttaaattgtacagcctttcataggccggttcaatgcatccgtactaagattgttaaggctgagggtccctagcctggggaaaaacgaaaggaggcagagggtagggagacgggaaggaagacaaggagggtgtagaaaacggggagaggagggggcgggacagcatggggaaggcctcaggtttactggagagatcgtggcgttcccatagaaacgtatccctccgcccatgacccgcgtgttagtctcttcagttccttccgcgtcgtttcttggctgtttccgcccagctcctttgtgccgcgcagaacaacgagatgacgcatgcgcaaagcgcagcggccgcatatataaacgcgaacccgggctcttcctcgtagtgccgccgggactcttggcgggtgaaggtgtgtgtcagcttttgcgtcactcgagccctgggcgctgcttgctaaagagccgagcacgcgggtctgtcatcatgtcgcgttacgggcggtacggaggaggtaagaagctggagtccggtgagggacgttggtgtgggtgtagtgagcactgcgaggccgtagggttgtcgcggaggttgggagacggttattccgcgtgcgtaatggcggcttaggagcacgccagacgaagccggaggcagcggaggcggggtgctgaagggagacgggatggcgggtgtacatctctgccgagttccgtactcttgggcatttttgtggcccaatccagcctaaagcagggttgagatgacggttttcgcgttgcctttctcggagctgcccgccggcccccctccccccccgccctcggccggcggctgccattttgcgcacattgaggaccgtggtggcgcatttcctcagcgctttcccgccacttcagcggacagatctggccgcagctgtaagatcgtggttgtgtttgagatagaacgaaattggcagctgtgagctgcatgttctcgtcaaacaatcggttaaattgcggaatgggaatggggacgtaatctgcgactggcggctgggtttttttttagttatttccagcgcggtttatggctctggggcggggagctggagtcttgggcgagcctgtgcctgggacgtttgccgcggaggacgagagccggcgcagccctgctctcctggcccggcccctaccgaggccctcccgccgccgacgcgctgccgctgcgggcccgcgcgctcccggtgcgcccggggctgccgggactcatgggtggggccgggccaggtcccgccccacgcctcggtgtatcctaccacgcgtttctgcttgtgttcgggagggtcaccccgcattatttagaacgttaagaattttgtcaaaagtctagtttctcggggatttgcggacttcaccagttttacgactaagttttgtcttggatagagggcattaaatgtgctttacccaatcttgaggatggcccgttttaaggcaagtaagtaattgaaacttgggccagattttgcataacgtgcattcttctatttgcgtttttaaacagaaaccaaggtgtatgttggtaacctgggaactggcgctggcaaaggagagttagaaagggctttcagttattatggtcctttaagaactgtatggattgcgagaaatcctccaggatttgcctttgtggaattcgaagatcctagagatgcagaagatgcagtacgaggactggatggaaagtaagtaagatgttatgaatcttctgttcattaaaatatactgtggctagataatgaacttagtgctaaatttggattctgaagtctggaagagaccttaaatagctggtcatagtgttaaatgctaaaggcacacgaaggttaaagaagatagcggagatggagttagggcttggtaaagaccgccaaagtttgttgggggggaaggagtggttggaaagagtgagtggttggaaagagttctttttaaatctataagtcctgaatatatttttaactttagaattttgttaatttgcttttattagggtgatttgtggctcccgagtgagggttgaactatcgacaggcatgcctcggagatcacgttttgatagaccacctgcccgacgtccctttgatccaaatgatagatgctatgagtgtggcgaaaagggacattatgcttatgattgtcatcgttacagccggcgaagaagaagcaggtatttattttaataaaggaatggttggtattctagttaatcaagtaattcttttattagcaaggcagaaactagtgtttttctataaacttgaatgttaattgtacaggtgtattttacaatttgtgtttaattaaaaaaatgttactatattaataatcaacctggtcaaaacctttcaggtttcttcgtttgagtcagtcgccttgattcagaatgtcacgagccttatgatatcatgctgaggcgccttgcaaatccgacaattaagatcctcctagaccttgaggtgatcagcataagaggccagatcccctcgagtcatctacacctagcttcaccttattctttaaagggcagaaaatttgagacggtgatcgccgtaacagtaaatttggcttacaattggggcccccctccggtttagaaagaggaacaccagattgaccacattcccaactagaaaaatcttcttgcgtcaatcaagcctcacctggctcatttggctgtcagtttgatcgtcgttagattgaagaaaacatctagatgcagcgatcggctatagatacttctagatcgtctagatctactagaccatgggccaaagagggtcgacctgcaaacttgcaaggtttatgttaaatacacattacagtgttttatattatgtaatgctaagttgtaattcagcttttaacaaatctttttttaggtagtaaaaaaaaaaatactcaacaactaataggcccagagtttatttccaaatgagacactaaatttaaatagttttgagatttgatttcagcagaggcacacaaactcttaaaaacgagttattgtctgacattttgttttttctctaacttgaaaaataggtcacggtctagatcacattctcgatccagaggaaggcgatactctcgctcacgcagcaggagcaggggacgaaggtgagatcttgtttaactgaagtctttctgtattattattaaattcactggtagtccaacacagaaaaagctcattattttttttggagacagggtcttgctctgtcacccgggctggagtacaggggcataaccacgactcactgctgccttgatgatctcttgggtttaagcagttctcctacctcagcctcccgagtagctgggactgtaggcactgccaccatacccagctaatttttatttttgtagaaatggtcttgcactgtttcccaggctggtctcaagctcctgggctcaaacgatcctcccgcagtgctgggattatgggcatgagccactgcaccgttccccagttgaagtcttaacaggccaaaaaaaaaaaaaactgtggagatggacttaaagttctttattttaggtcaaggtcagcatctcctcgacgatcaagatctatctctcttcgtagatcaagatcagcttcactcagaagatctaggtctggttctataaaaggatcgaggtatttccagtatgtaacactttttttccttacttgtgtttggattgttcacatcttatcagtagagtgtcttaaggacataattcaaatggattgcttcagggaatatttgagatgtaaaagtttggaatttatgtgtaacttgtaacataaatattaccctagtttcacagatgaagaaaagggctactagagattttaaggcttgttaggccgtgtggtagacaagggtcccaagcaatacagctctactcaacactctgggtaggcatgttgctataaacttttctggcttcagattggatgatactagctctgaaagatggtaattgattttcccgacaaaaaggcctattagcaccaggaaaagagatcagaagcaagtagaaacatttctcatttttggaatgatggggttgatttgagacactggaaagttgactagggcagtagtgtgtacacagaaatgaatgtggattttttttttagaccgtttcagacctgaaaaaactaaagaaccagagctttactatttgtagaaggccttaaaaggagatagaatggaaaaaattgtaaaataagtattgcaacatgtaattaacaatattgttatctgtaccaacgataaaaccgtggtacggaatgctactgggagttaaattgctgtttaatagcacaaaacctttaaatgcaggaattctgaatcttgtggtctatttgagaaagctatgaaccatctctttagataaatttaaaagatagatatgtcagtctgatttggtttgtctgacagattgatggctctcaaacataacttgatccgggaagaagcctgacaaatggggggcggctttcttttcgtctggccttatcacctgaattagtctcagttcaggggtctggttattttcatcctgccttagcctcctgagtagctgggactgccattgtgtaccacagtgcccagctgagggatctgtgccttaagtgaggttagttttgcttccttcataccagtctcatcaaatgaaaaccatgtatttcccttggatattacacagtgtttgagaatgttatacctgtacagaaactaaccaattgagtgatagaaacaagtaattgaaatgggggttccttatgtctggtaacactttgtttgacagtgtgttagacagaataaggcaagtgttgcatcttgtttagttttagcttctttatgcctgaccaacctaatacagtgttgagtagttaaggaaattcctttggactgattgatataattgtgttttttcactttttttattaagatccccgtcgaggtcaagatcaagatccaggtctatttcacgaccaagaagcaggtagggtaaaaatttgattatccttttctagttatatggcaccaatatccaaagagttcaaagtgtttttaattgttgaaattttaagtgttaactctaaacttaggttttagtgggaacacagtaccttatttgtgtatgtcctatttattactggctgactttccctgaacaagggaatgtaaaactatagtgagaaagaagcttatgacttgggggattatattaaagaggcccttgttagaactgataggtgcatggagaagcatcctgaaatcgatgtgcttaaagcagaatgtaaaagattaatcatgatgtagtaattgagtcattttttgaaaaacagttgttgaaagattggcttttgttagcaacaactggtaggatgtttttcagtttaagtgcagtctgacattttaagcttaggacatttgggggttttacggtattggtgactacaagaaagggattggttagtactctttctttaatagaatttctcatgttttgacagccgatcaaagtccagatctccatctccaaaaagaaggtaagctaaatgttttgttgccaaatcttgcctgtcaagtgtggcctctgcagaatttgtttgcttactgctttgcagtctttgagctctttggagaattggtgctatatagattaaaatactatgctaagtttctgaaatactttttttttttgattcagtaacattagtttatacttttgctggaaatacttagtcataaaatgttagggtgattattaagatgtgattggtcctgtgagtacttggtagaaattttggtaagatagatgccttttccccacatgtacaatagatacaaagtgtggagaaaagtcttggaaatagttacctgcctagtgcttctttatgaccagaaaacttcaaatagttgtcatatttatctagtgcttcttaatgaccagaagacttcaaatagttgtcatatttaactgcaggttgaccttgcaattttgacaaggaggatagcctaatttttttttttttctgggatggagttttcgctctgtccccaggcttggagtgcagtggctcaatcttggctcactgcagcctccgattcccgggttcaagcaattatcctgtctcagcctcttgagcagttgggattacaggcacccaccgccaagcctggctaattttttgtatttctagtagagacggagtttcaccatgttggcgaggttggtcttaaactcctgatcttaggtgatcacctgcctcggcctctcccaaagtgctggggttacaggcgtgagccaccgtgcctggccagggtagcctaatcttaagccagggacaaaagatgaatatatgtaagtttcatgtcatttttaggtctttgctataggaaattagtaccttaggccacctttgaagttattgaaagttagtacatgtacatgagagtttcaattgacactaattggatccaaacctaatgtttttctttttagtcgttccccatcaggaagtcctcgcagaagtgcaagtcctgaaagaatggactgaagctctcaagttcaccctttagggaaaagttattttgtttacattattataagggatttgtgatgtctgtaaagtgtaacctaggaaagataattcaaccatctaatcaaaatggatctggattactatgtaaattcacagcagtaaggataatataaattttgttgaatgtatgaacatcatatggtctgaaaatgtgggtttttatttggcacatttaaataacatgtttctaactagatttttgatttgtgttcaatattaacacttcttaatttgatatatttgagagtcagacattataattgttaatccttattcatacatacctacattcagaattgaaaggtgttggttaagtcttgaacatcactattctatgcataaaacttggccaggatcttaagggactttgaaaattccatcttacccttgtagctctgggtaagatgacctgagtcccttatgatacagcctgaatgcatcatgacagatccttagttagctaatccgtttgaagttggtgttagtaggtattgtatgatcagtggtgaagcaagtaggaccactgatgtgtctaaatgagcatgacaggaactaaacgaaactgattaaatgtatgagaaatagaaactgatttctggatgatctttatactaattgcagctttcaggctactaggtggcatagtgttaattaggactccccaagatatggggagttctactctcaatggtcttgtttctttgctttctacattagttaaccagttttataccaaaaaatgcatgtttgaggaattgtctgaaattgggacaaaacaccttcatgtaaaccagctttgcaaaattttccagcccagatactcttcatctattcaaatggattgtcttattctgagcaaagacctgttgttaatcttcaagctaggttttgcagttcccaaccacaacattcttctattttgccaggctggtgcaaagtaattaaagatgtcaatcagaaatgtcaatgagactaaagtggttttgtaaatctcagctatatttagcaacactccatgtagctaatattttttggtagcatctggtagaccttagaatgttacatagccagtaggttctttattcaaattttaagtatcttaagaatagtagggcagtaacagttacttttgagagttttctggtcaagcttttaccaggcattctctagccttggtacaaaaaaaaaaaaaacctgctggttgcgcagatacctaggcttgtccattttatgcatttcagcaaagtcattggagactattgcaacttgggaatactggtctgcatcaagtttaattcggtagtttgaccgctagtatgttggaagttatttggattgtttttggaattttgactggctgaattatggttggtataaagttatgtgtataactggcaggcttatttatctgttgcacttggttagctttaattgttctgtattatttaaagataagtttactcaacaataaatctgcagagattgaacaaataatcctgatacttaatttttggaagtgggagctc

SEQ ID NO: 317 - DNA, 572 bp, Homo sapiens
cgccgcattgtggtccgcttctctgcactatgtcgggtggcctcctgaaggcgctgcgcagcgactcctacgtggagctgagccagtaccgggaccagcacttccggggtgacaatgaagaacaagaaaaattactgaagaaaagctgtacgttatatgttggaaatctttctttttacacaactgaagaacaaatctatgaactcttcagcaaaagtggtgacataaagaaaatcattatgggtctggataaaatgaagaaaacagcatgtggattctgttttgtggaatattactcacgcgcagatgcggaaaacgccatgcggtacataaatgggacgcgtctggatgaccgaatcattcgcacagactgggacgcaggctttaaggagggcaggcaatacggccgtgggcgatctgggggccaggttcgggatgagtatcggcaggactacgatgctgggagaggaggctatggaaaactggcacagaaccagtgagtggtgagagctctgtcagtgacaaacactcctttggcctgttgaatttgctgaagaacatcacctaaagtc

SEQ ID NO: 318 - DNA, 338 bp, Homo sapiens; identical to SEQ ID NO: 17
  modified_base (301): a, t, c, g, other or unknown
  modified_base (332): a, t, c, g, other or unknown

SEQ ID NO: 319 - DNA, 451 bp, Homo sapiens; identical to SEQ ID NO: 37
  modified_base (2): a, t, c, g, other or unknown
  modified_base (421): a, t, c, g, other or unknown
  modified_base (451): a, t, c, g, other or unknown

SEQ ID NO: 320 - DNA, 359 bp, Homo sapiens; identical to SEQ ID NO: 70
  modified_base (103): a, t, c, g, other or unknown
  modified_base (265): a, t, c, g, other or unknown
  modified_base (274): a, t, c, g, other or unknown

SEQ ID NO: 321 - DNA, 295 bp, Homo sapiens; identical to SEQ ID NO: 77
  modified_base (247): a, t, c, g, other or unknown

SEQ ID NO: 322 - DNA, 406 bp, Homo sapiens; identical to SEQ ID NO: 78
  modified_base (13): a, t, c, g, other or unknown
  modified_base (102): a, t, c, g, other or unknown
  modified_base (105): a, t, c, g, other or unknown
  modified_base (231): a, t, c, g, other or unknown
  modified_base (340): a, t, c, g, other or unknown

SEQ ID NO: 323 - DNA, 489 bp, Homo sapiens; identical to SEQ ID NO: 147
  modified_base (392): a, t, c, g, other or unknown

SEQ ID NO: 324 - DNA, 491 bp, Homo sapiens; identical to SEQ ID NO: 163

SEQ ID NO: 325 - DNA, 546 bp, Homo sapiens; identical to SEQ ID NO: 172

SEQ ID NO: 326 - DNA, 456 bp, Homo sapiens; identical to SEQ ID NO: 197

SEQ ID NO: 327 - DNA, 462 bp, Homo sapiens; identical to SEQ ID NO: 205

SEQ ID NO: 328 - DNA, 457 bp, Homo sapiens; identical to SEQ ID NO: 212

SEQ ID NO: 329 - DNA, 448 bp, Homo sapiens; identical to SEQ ID NO: 221

SEQ ID NO: 330 - DNA, 373 bp, Homo sapiens; identical to SEQ ID NO: 222

SEQ ID NO: 331 - DNA, 306 bp, Homo sapiens
ggcgaagaggaccaggactatgacatcacccagctccaccgaggtctggaggccaggccggaggtggttctccgcaatgacgtggcaccaaccatcatcccgacacccatgtaccgtcctcggccagccaacccagatgaaatcggcaactttataattgagaacctgaaggcggctaacacagaccccacagccccgccctacgacaccctcttggtgttcgactatgagggcagcggctccgacgccgcgtccctgagctccctcacctcctccgcctccgaccaagaccaagattacgattat

SEQ ID NO: 332 - DNA, 626 bp, Homo sapiens
  modified_base (384): a, t, c, g, other or unknown
  modified_base (449): a, t, c, g, other or unknown
  modified_base (567): a, t, c, g, other or unknown
  modified_base (576): a, t, c, g, other or unknown
tcacgtatcgcaaggggcttttattggattagttgcgtgggggaatcagttcttcccgagagcagcaagtgcaggcattagtgtacagaatccagaggaagggcaggctgcttgggtgaggcctactcgcctggagacatgtggagttctctaggggtctgcagccacctcggggagctgggagattccctcccagacactcctacatataggaaggtgatgcttctatctcattccgcacggcttttcctgcggtattcctgtagcgccttctccgccactgtgtccataaacttagggttatccttagagacttcttctggtaacaccactgtgatggggtcagagtcaaacagcttcaccaccacctcagtgacacgggangggacctctgagtcagaggaatgggtggtcacggtggagacccgaaggtaagtacttgtcttcgncctgtgtgaaggttagccaactgggaaacccagtttgaactggtcgttcagcttgctccagcagggaatgaggtgttgagcatctttcgactggaaagactgcagcagttccctgtantgctctgtnagcctttcggcacctggagcgagtcgttaagtcctgggcaggttagctgg

SEQ ID NO: 333 - DNA, 4898 bp, Homo sapiens
gaattccggctgccaggggcgtccggttacatccccgccttcctctgtcctggccgcgggaccgggtttgcgggaccgcagttcgggaacatgttggcctcgagcagccggatccgggctgcgtggacgcgggcgctgctgctgccgctgctgctggcggggcctgtgggctgcctgagccgccaggagctctttcccttcggccccggacagggggacctggagctggaggacggggatgacttcgtctctcctgccctggagctgagtggggcgctccgcttctacgacagatccgacatcgacgcagtctacgtcaccacaaatggcatcattgctacgagtgaacccccggccaaagaatcccatcccgggctcttcccaccaacattcggtgcagtcgcccctttcctggcggacttggacacgaccgatggcctggggaaggtttattatcgagaagacttatccccctccatcactcagcgagcagcagagtgtgtccacagagggttcccggagatctctttccagcctagtagcgcggtggttgtcacttgggaatccgtggccccctaccaagggcccagcagggacccagaccagaaaggcaagagaaacacgttccaggctgttctagcctcctctgattccagctcctatgccattttcctttatcctgaggatggtctgcagttccatacgacattctcaaagaaggaaaacaaccaagttcctgccgtggttgcattcagtcaaggttcagtgggattcttatggaagagcaacggagcttataacatatttgctaatgacagggaatcaattgaaaatttggccaagagtagtaactctgggcagcagggtgtctgggtgtttgagattgggagtccagccaccaccaatggcgtggtgcctgcagacgtgatcctcggaactgaagatggggcagagtatgatgatgaggatgaagattatgacctggcgaccactcgtctgggcctggaggatgtgggcaccacgcccttctcctacaaggctctgagaaggggaggtgctgacacatacagtgtgcccagcgtcctctccccgcgccgggcagctaccgaaaggccccttggacctcccacagagagaaccaggtctttccagttggcagtggagacttttcaccagcagcaccctcaggtcatagatgtggatgaagttgaggaaacaggagttgttttcagctataacacggattcccgccagacgtgtgctaacaacagacaccagtgctcggtgcacgcagagtgcagggactacgccacgggcttctgctgcagctgtgtcgctggctatacgggcaatggcaggcaatgtgttgcagaaggttccccccagcgagtcaatggcaaggtgaaaggaaggatctttgtggggagcagccaggtccccattgtctttgagaacactgacctccactcttacgtagtaatgaaccacgggcgctcctacacagccatcagcaccattcccgagaccgttggatattctctgcttccactggccccagttggaggcatcattggatggatgtttgcagtggagcaggacggattcaagaatgggttcagcatcaccgggggtgagttcactcgccaggctgaggtgaccttcgtggggcacccgggcaatctggtcattaagcagcggttcagcggcatcgatgagcatgggcacctgaccatcgacacggagctggagggccgcgtgccgcagattccgttcggctcctccgtgcacattgagccctacacggagctgtaccactactccacctcagtgatcacttcctcctccacccgggagtacacggtgactgagcccgagcgagatggggcatctccttcacgcatctacacttaccagtggcgccagaccatcaccttccaggaatgcgtccacgatgactcccggccagccctgcccagcacccagcagctctcggtggacagcgtgttcgtcctgtacaaccaggaggagaagatcttgcgctacgctttcagcaactccattgggcctgtgagggaaggctcccctgatgctcttcagaatccctgctacatcggcactcatgggtgtgacaccaacgcggcctgtcgccctggtcccaggacacagttcacctgcgagtgctccatcggcttccgaggagacgggcgaacctgctatgatattgatgaatgttcagaacaaccctcagtgtgtgggagccacacaatctgcaataatcacccaggaaccttccgctgcgagtgtgtggagggctaccagttttcagatgagggaacgtgtgtggctgtcgtggaccagcgccccatcaactactgtgaaactggccttcataactgcgacataccccagcgggcccagtgtatctacacaggaggctcctcctacacctgttcctgcttgccaggcttttctggggatggccaagcctgccaagatgtagatgaatgccagccaagccgatgtcaccctgacgccttctgctacaacactccaggctctttcacgtgccagtgcaaacctggttatcagggagacggcttccgttgcgtgcccggagaggtggagaaaacccggtgccagcacgagcgagaacacattctcggggcagcgggggcgacagacccacagcgacccattcctccggggctgttcgttcctgagtgcgatgcgcacgggcactacgcgcccacccagtgccacggcagcaccggctactgctggtgcgtggatcgcgacggccgcgaggtggagggcaccaggaccaggcccgggatgacgcccccgtgtctgagtacagtggctcccccgattcaccaaggacctgcggtgcctaccgccgtgatccccttgcctcctgggacccatttactctttgcccagactgggaagattgagcgcctgcccctggagggaaataccatgaggaagacagaagcaaaggcgttccttcatgtcccggctaaagtcatcattggactggcctttgactgcgtggacaagatggtttactggacggacatcactgagccttccattgggagagctagtctacatggtggagagccaaccaccatcattagacaagatcttggaagtccagaaggtatcgctgttgatcaccttggccgcaacatcttctggacagactctaacctggatcgaatagaagtggcgaagctggacggcacgcagcgccgggtgctctttgagactgacctggtgaatcccagaggcattgtaacggattccgtgagagggaacctttactggacagactggaacagagataaccccaagattgaaacttcctacatggacggcacgaaccggaggatccttgtgcaggatgacctgggcttgcccaatggactgcacttcgatgcgttctcatctcagctctgctgggtggatgcaggcaccaatcgggcggaatgcctgaaccccagtcagcccagcagacgcaaggctctcgaagggctccagtatccttttgctgtgacgagctacgggaagaatctgtatttcacagactggaagatgaattccgtggttgctctcgatcttgcaatttccaaggagacggatgctttccaaccccacaagcagacccggctgtatggcatcaccacggccctgtctcagtgtccgcaaggccataactactgctcagtgaacaatggcggctgcacccacctatgcttggccaccccagggagcaggacctgccgttgccctgacaacaccttgggagttgactgtatcgaacggaaatgaagacaagagtgccttatttcctttccaagtatttcacagcaacactctacttgaagcaacttggtccagattgaaaagtgtcctctggctgagtggccactaggcccagacccagcccagcctgagccccaacaacaacttttccctcactgttccccaaaacatgcaccctggacttctctaatagaaaagtctccacccctacacaaggacagaaccctccacccctacccccaaccctcagacagacttatacacccctgagtgaggattacatgcccatcccagtgtcctaggaccttttcccaatactagccccccagtggtgaacagaacctcccaaatttgagttgcacccttccctgtggccttatgagctcagcctcgctttgaggtacccaccgtcctgtcagctccttgacctatgagctggggcctgactaggaaaagttgggagttaaggaggaaattagcattccttaatgttttgttttggtgctctgaatttcttctttattatagtcctatagttttactcctcagttcctcaccatcatcatcttgtctaagacccccattataatattcatgcgctgctttttcatcaaaacctaccctgtcctagagatctatgggcatttggtggatgataatgagcagcccctcccagatagaatgtcaatatttgagcagtaggatattggcatttgttagttaaaggcttaaatcaaaagaatgtccaatggtaggaatttcaaggtgtaggtcagatatttgagaataggggatttttttgatgtgccttaaattataccaaagattactaattattcctctttgcccaaaatacttgcatccaaggttctagtctctgttgctgtgctggtctttagccccactgctggcactgatgtccctcctttttcacggagacctatctgaggtacaggatggggctggcaccagatgatgtcccaccacagtccctcacctccggcctccacatgacagaaccaatttacactcaaccatgacctcacccctccttggtttctccctccccg

SEQ ID NO: 334 - DNA, 429 bp, Homo sapiens
  modified_base (13): a, t, c, g, other or unknown
  modified_base (22)..(23): a, t, c, g, other or unknown
  modified_base (25): a, t, c, g, other or unknown
  modified_base (27): a, t, c, g, other or unknown
  modified_base (41): a, t, c, g, other or unknown
  modified_base (233): a, t, c, g, other or unknown
  modified_base (235)..(236): a, t, c, g, other or unknown
tgtttcggaggcnagcggggcnngncntgtgacaactgccngtagacctggggctgctgaacccagtcccgatggcaccaccggccacacctacaaccagtatacacagagatacaatcagagaacaaacactaacgtaaattgccccattgagtgcttcatgccgctagatgtgcaagctgacagagacgattctcgagagtaatctttccagccccacccgtacaagtgtntnnctaccaaggtcaatccacaccccagtgatgttagcagaccctccatctttgagtggtcctttcacccttaagccttttgctctggagccatgttctcagcttcagacaatttacagcttctccaagcatcgcccgtggattgttttgagacttctctcctcaatggtgacagttggtcacctgttctgcttca

SEQ ID NO: 335 - DNA, 411 bp, Homo sapiens
cccaccgacccatctgcaaaatcccggaagagccaaggagggggacacaggcagtaccagtggcaccagcagcccaccagccccctgccgccctgtaccttgtatctccctttccccagggcctgtgcttgaacctgaggcactgcacacccccacactcatgaccacaccctccctaactcctttcacccccagcctggtcttcacctaccccagcactcctgagccttgtgcctcagctcatcgcaagagtagcagcagcagcggaagacccatcctctgacccccttggctctccaaccctcctcgctttgtgaggcgcctgagccctactccctgcagatgccacccttagccaatgtctcctccccttcccccaccggtccagctggcctggacagtatcccagaa

SEQ ID NO: 336 - DNA, 255 bp, Rattus sp.
acactgttccatgtggttctcctagcttcatccgtgaaggactgaggacctttgttatacttaacaaaacccagatgcatcaatttctgatgctttttactgttgtgtataatctacttaagtgttttatttctgccgaaagtattcaggtttgctgtggacatcaggagtctgaattctgttcttactgattttgttccatggttgaattttaaaagtgtttaacaatgaaggaactttattctttagtcaaaa

SEQ ID NO: 337 - DNA, 255 bp, Rattus sp.
acaatgccccaagagtggcttttgggaggcagtaacttagcatagggggtggctgggttgccgactcgttggggattcagtgtggcaaaatggggagagcgtggctcctgctggtcttcgcgcagtgtaaatgaaccatccgtcttctcaggaatattattcagtgtctggccagtgggtctcatagggttcacctctgtcaacggggtgtctgttatattcgttggctgttgatcctctgttaatttagggaat

SEQ ID NO: 338 - DNA, 232 bp, Rattus sp.
acttcatccgggatgagtttctgagaatcagcactgctagtggagatggacgtcactactgctaccctcactttacctgcgccgtggacactgaaaacatccgccgtgtcttcaacgactgccgtgacatcatccagcgcatgcatcttcgccaatacgagctgctctaagaagggaacgcccaaatttaattcagccttaagcacaattaattaagagtgaaacgcaatcg

SEQ ID NO: 339 - DNA, 255 bp, Rattus sp.
cccaggctaaagatgatataaatagaggtatgtcgtgcgtcacatctgtcacaccaagaggactgggccgggatgaggaagatacctcttttgaatcgctttctaaattcaatgtcaagtttccgcctgtggacagtgactctacttttctacatagcactccagagaccccgagcatccttgctccctccacacctgaggcagtgtgccaggacaagtttaatgtggaagttagagacagcccaggaaacttgg

SEQ ID NO: 340 - DNA, 255 bp, Rattus sp.
acgtccatatatttgacaaagaaagtttacatttttttaataaagatgcaaagtatgcaaaaaacattaatactgatgcaaaaaaaaaaagagtaaaagtaaagaaaaaaaaaacaaaaaccaaaacaaaagaaggcagaggaagctgtctaaaccgtcctcggcctgtcggaatggtggtaacaatgatatgaaatgggatctgtggggaagggggctttaaaagaaaacaaaatttgctgctttaaaaaaaaa

SEQ ID NO: 341 - DNA, 255 bp, Rattus sp.
acatggaagacgtctgtggaaatttctctctagcgtgggggctccaaacagaacctacaacacacagcagtatactaactgcagaaatgccaactagaagcaatggcctctggcagggtggccctatgaaatggcacaacaatatgaaatgtaaaaggacagtgaggaaacttttacttcaaaacaggaagccacagtagaatggttatcttattctgacacattagaagcaggaattgcagcttcaagcactca

SEQ ID NO: 342 - DNA, 255 bp, Rattus sp.
accccactggcaaattctgccgagtgaggagcttggttattggggccagcagtcgttttacccggaatgcccttcctgctctgctcatctacaaggcgggtgaattgattggcaattttgttcgtgtcactgaccagctgggcgaagatttctttgctgtagaccttgaagctttcctgcaggaatttggattgctcccagaaaaggtcttggtgctgacatctgtgcgaaactctgccacctgtcacagtgaag

SEQ ID NO: 343 - DNA, 255 bp, Rattus sp.
acctgattttacggcggcatgggaatctcttcattaccctgtttgcgctgatgttgactgcagggcttcccgagctcacatcagtcaaagatatacagtatcttaaggactctcttgccttaggaaagagtgaagaagaagcactcaaacagtttaagcagaagtttgatgaggcactcagggaaagctggaccactaaggtgaactggatggctcatacagttcggaaagactacaggtcttagcgtccgctct

SEQ ID NO: 344 - DNA, 255 bp, Rattus sp.
acttgtatcaaatagaaaaaccttataaagaagtcatgacaagacaccctgttgaagaactcttagattcctatcactaccaagtagaactggctctacaaactgaaaaccagcaccgagctattgatcaagtgattaaagcagtaagaaaaatctgtagtgctttagatggggttgagacccccgccgtcacagaagcagtgaagaagctaaagcgagcagttaaccttccaaggaacaaaagtgctgatgtga

SEQ ID NO: 345 - DNA, 250 bp, Rattus sp.
acctccctgtctgttaagaaggcacatatgagattcttcgcatgtttagaaatttctgtatcttcaggaaaacacagtgaatttttatgatccataattttgctgtaggttcctacaagtgaatctgcataaaatggagtatcccctactaacatctcaaaaaggaaaacacctacagaccaccaatcacattctcgtccatagtaaccatcacctccttgtgatttcagaacctcaggtgatatgtagt

SEQ ID NO: 346 - DNA, 255 bp, Rattus sp.
acaagcttttttttttttttttttttttttttttttttctatttcatactctttattgccaagagttcaaaatggtcaacataaaaaaaaaagacatcttgataataaatactgctcttggggctgtaataaataaaaagtttattaacaaggaatgcacttttccagccacaagtgtattcaaaaataaccaaaaaaaaaatatgtatggccatagttcacagttaagcagccaaacaaaagctgctctgattg

SEQ ID NO: 347 - DNA, 255 bp, Rattus sp.
accatcacagtgaccagaagggtcacagcctacactgtggatgtgaccggtcgggaaggagtgaaggacattgacatcagcagccctgaattcatgatcaagataccgaggcacgaagtgactgaaatttccaacacagatgtggaaacccagcctgggaaaacagtgatccgactgccgtcgggatccggggcagcctctccaaccacgggctctgctgtggatatccgggcaggtgccatttctgcctcagga

SEQ ID NO: 348 - DNA, 250 bp, Rattus sp.
acatggacatggtcaaggagcggatcgaccgcttcggtggatataaatctccgaggtgcgaggcacctggtaatggatgacatgctgaactttaggaatatccagaccccgagctgccacgtctgttgccaagagaacacagtcttccagccgagcaaactgctccaggtttctgagcctttgcttctggtgcatgcaggcatgcagggtcagtggcatgatatccaagaccttgaggagcccagagggg

SEQ ID NO: 349 - DNA, 255 bp, Rattus sp.
acttccagcggatcttggccaggatatgtttgtctttgatgatatactcgtaggtggtcaataagacattgaacttgccgctgcgaagctgggggacaaaagctcgtctggcagctggagagcccttgtaggaaaccttcaccacagagggggcccacttgtcaaattcatatgcccagtttgacagcgtcctgaagggaaaggaagggatagtcaggttctacactaggcaatagtgaagccaacaggcctggt

SEQ ID NO: 350 - DNA, 255 bp, Rattus sp.
aagctttttttttttttttttttttttttttttttggggaagtgaggatttattaagaatattaaaggccaggaattttattttaaccataaaccctaagttttcttttagtgcttcaaaaatccattatcatttaagaccagataaattacatggctaaccagctgtccagtgctgagcctaaaaaataacctccaatggaacaagaccgagctcagccactgaaccaaggggtgcagggtggtcacgcctctc

SEQ ID NO: 351 - DNA, 255 bp, Rattus sp.
acttacctggtggctcccctgtggttcttctgggtgcaagagtgtccgggtcacagaaagctatttcatctggtggccaaaaaagagtgacttcaaggcgttcagcagatatgcagtcttcaaatacagacatttcttttaaaaccaggaaaaggctaaacttcgaagataaagttatttcgaacacagcagaaatagagagcagtgcatcacaagtagaggatagcatatccgaggaacaagaagggacatcat

SEQ ID NO: 352 - DNA, 109 bp, Rattus sp.
ggcttcatcaccactcggtagttgtaatttcgccttttatcagaagctgatacattttcatcagcatcggatcgaatttctatgtattcaatatcttgcccacgatagg

SEQ ID NO: 353 - DNA, 251 bp, Rattus sp.
accagaggcgaggatcgcttcagctctggcagtttctggtagctcttctggatgacccttcaaattctcattttattgcctggactgggcgaggcatggaatttaaactgattgagcctgaagaggtggcccgacgttggggcattcagaagaacaggccagctatgaactatgacaaacttagccgttctctccgctattattatgagaagggaatcatgcaaaaggtggctggagatagatatgtctac

SEQ ID NO: 354 - DNA, 255 bp, Rattus sp.
acaagcttttttttttttttttttttttttttttggtaaaaatagttttattctccttcaaacataaaccatcactcttggggaagggaaggtggcagggtggtccacggctcacttgaatggggtggggggagattaagaagtcccaccccactgcctagctgagataagattacatccctaacactgtgtataaatatctccttatattaaaacaatttttcaggtcccacttcactctacctcaagctggga

SEQ ID NO: 355 - DNA, 255 bp, Rattus sp.
acagactgtgacgagatacagtttaaggaggatggctcgtgggctccgatgaggtcaaaaaaaggaagtgcaagaagtcactgcctcctacaatggggtcgatggatgcttgagctccacattggagcatcaggtggcttcccacaaccagtcttcaaataaaaacaagaaagtggaggtgattgacctaaccattgacagttcatcagatgaagaggaggaagaaccccctgccaagaggacctgtccttccct

SEQ ID NO: 356 - DNA, 199 bp, Rattus sp.
  modified_base (152): a, t, c, g, other or unknown
  modified_base (154): a, t, c, g, other or unknown
cttatccccaagggtgctgagaattccaaaggttatgactttgaaattaagtttaatcctgaggctggtgccaactgccttgtcaaatacgggactcaagtgtatgcacctctcaaagaactcttgaatgaaatctaagaagaaattagctnanctctgaataaaaagatgggtctggaggatactttacaacgactga

SEQ ID NO: 357 - DNA, 255 bp, Rattus sp.
actggcacatgagacctagagcaggaccaacttctcacacatagtcagtgggaaaagaaagtgccttgaaagttcctccctcacctacacagtagtcgtcatgtcgagacctgccagagagagacacattctcaagtgaatcctggcttcttggaagcgcttgcctagacgagacacagtgcattaaaacaacttttgggggacaggtatgtttttcttgcagctgcagttgtaaggtcttggcaagacgagcag

SEQ ID NO: 358 - DNA, 255 bp, Rattus sp.
acacgcaaaacacatcaaaaagtgatcaaggagttgcaaaacagaaagttaacacagtggtagatgcaaccagagtgaagcgctggtcaaagacccctgtcaaaatgacataccctctagaaggtgcagctgatttcacggagcactttgaaacaccagatctcaaagatgaacccataggtgatgatgaaactaaagtcctttgcaaatccccacaacccaaaacagagaacctcaaggcaagcgcaaagccac

SEQ ID NO: 359 - DNA, 255 bp, Rattus sp.
  modified_base (26): a, t, c, g, other or unknown
  modified_base (36)..(37): a, t, c, g, other or unknown
  modified_base (41)..(44): a, t, c, g, other or unknown
  modified_base (99)..(105): a, t, c, g, other or unknown
  modified_base (107)..(108): a, t, c, g, other or unknown
  modified_base (113)..(114): a, t, c, g, other or unknown
  modified_base (116)..(118): a, t, c, g, other or unknown
  modified_base (121): a, t, c, g, other or unknown
  modified_base (130): a, t, c, g, other or unknown
  modified_base (148): a, t, c, g, other or unknown
cgtcaagtcggcaaaagacaacgaanggycccccgnncccnnnnggataaaaatgcygctgttttcyctcgtggccgggtttttttgtttttggtctannnnnnnanngaaannannnaangaaaccccntcactaattttttcwwanatactaaaatatccaacygmagaaatcatttcggcacatcccgacctccgatctccctgtttttaataactgtagaaaagcatctgtgtccacttgttggccgaaga

SEQ ID NO: 360 - DNA, 255 bp, Rattus sp.
  modified_base (10): a, t, c, g, other or unknown
  modified_base (57): a, t, c, g, other or unknown
accagagtanataagaagtgagttttattcaaatttaatgcaggaatcacaacatanttaccgcttcaatttcttcacactgatgaattcttttgctgttaacacacaaattcacctgttgggcttggctgctaaaacattctaccgaatgacggttacattttcttcatctactttgcaaacaacgaacacctgcgcccgcacccattttccgctgtaatttatgctgtgatgaactgatgcgtgactccccac

SEQ ID NO: 361 - DNA, 255 bp, Rattus sp.
actcaggaaaacacaacggtatttgcatttacttttctcgaatcatgggaaatatttgggatgctagcttagttgttgaaagagtattcaagagttccaacagggagatcactgcaattgaaagcagtgtgcctatccagctgctggagtcagtgctacaggaactgaagggtttgcaggaatttctagacagaaattctcagttttcaggaggaccactaggaaatccaaataccactgccaaagtgcagcaga

SEQ ID NO: 362 - DNA, 255 bp, Rattus sp.
ataaaaaccatccctctgtgcatcctctgcttccctcaggttggaagccaggactcctagtcagctagtcctggccgctctatcacagcctccaagggaagagctgcctgcgagaggccttcctagaccacaacccatgttgcaacaaggcagggcctgttccgggtcctacctcccagcagagtggaccaggttgagcctccccccatcacatacacactgtgttgcctgcagtaactggcagctctgttcctt

SEQ ID NO: 363 - DNA, 255 bp, Rattus sp.
tgccagtcaagctgcggttgattgataccctgcgtatggttacagaaggaaagatttatgttgaaattgagcgtgccaggctgactaaaaccttagcaactataaaagagcaaaatggcgacgtgaaggaggccgcctccatcctgcaggagttacaggtggaaacctatgggtctatggagaagaaggagcgagtggagtttattctggagcagatgaggctctgcctagccgtgaaggattacattcgcacac

SEQ ID NO: 364 - DNA, 255 bp, Rattus sp.
accacgctcaacgcagatgaggctgtggctagagggtgcgcactgcagtgtgcaattctttctccggcatttaaagttagagagttctccgtcaccgatgcagttcctttcccaatatctctggtctggaaccatgactcagaagaaactgaaggtgttcacgaggtgttcagtcggaaccatgctgctcctttctccaaagtgctcaccttcctgagaaggggaccctttgaactataagctttctattctgac

SEQ ID NO: 365 - DNA, 255 bp, Rattus sp.
acattgatcaagaagaactcaacaaaacaaagccgatctggaccagaaatcctgatgacattacgaatgaagaatacggagagttctacaagagcttaaccaacgactgggaagaacatttggcagtaaagcatttttctgttgaaggacaattagaattccgggctcttctttttgtcccaagacgcgctccttttgatctatttgaaaacagaaagaaaaagaacaacatcaagttgtatgttcgcagagttt

SEQ ID NO: 366 - DNA, 251 bp, Rattus sp.
acctgtggtatgacatgtgcaaagattctgcctgcttttcgactatgaaggagacagacctggaggctgttgcaacagcagtccaaagggtggctgggatgcttcagcgcccagaccagctggacaaagtggagcagtatcgcagaagggaggctcggaagaaggcatctgtggaggccaggctaaaggccgcaatccagtctcaactagatggcgtccgcacaggcctaagccaactgcacaatgcactg

SEQ ID NO: 367 - DNA, 255 bp, Rattus sp.
acagaggcctgaaggagtcaatgaagcccacgtcagcagtcaggtttggcaggaaccaaaagtggtgccttcctccagttatcagccagatgatgaggaacaggatgcagcgagcaatagcaaggaggagaatgctggctacaaaacagcctgcgcccgcactgaggtaatacacacctactctcatttctgctggccagagagggaagagggtggcagctattactgcaatcacaagaattaatcccatgacaa

SEQ ID NO: 368 - DNA, 255 bp, Rattus sp.
  modified_base (157): a, t, c, g, other or unknown
  modified_base (159): a, t, c, g, other or unknown
ctttttttttttttttttttttttttttttttttcctcagaggcttttattgatttctgtgcccagcaaacagtggaatttggaggagtgaggygagagccttcggggagttaagcacaggacagcaggtgggaataagccaggatgaggctccatnhncaactccccaaggacaagacagccagcaaaacatgtgtcaggtgcagcagcactctcagtgccggggcatcttggctgggcttgggggatacctgg

SEQ ID NO: 369 - DNA, 255 bp, Rattus sp.
  modified_base (156)..(157): a, t, c, g, other or unknown
accccggagaggtgtcccgggttccggtcgcagatcactccctagcacctaagcraagccaagatttccaagccagcaccttattgggaaggracagctgtgataaacggagaattcraggagctcaaattgaccgactatcgtgggarakacttnnttwtgggcttctacccactggatttcacctttgtgtgtccaactgagatcatcgcttttggggatcgaattgaagaattcaaatctataaatactgaa

SEQ ID NO: 370 - DNA, 255 bp, Rattus sp.
accttttgggaatctaatgtattgtaaggtattttacacgtgtcctgattttgccacgacctggatattgaagctatccaagcttttgaaataaaaattaaacaaaaccccaagcctgggtgagtgtgggatgctctgtaagaccttgcccagtattggagatgccacgtgctctgggactaaggtctcctggagcagaggtcctttagctgttttccccatctgatcttttcagctatcattttatgcccattg

SEQ ID NO: 371 - DNA, 255 bp, Rattus sp.
accttctttctagcggtcagtgctctctattcctccagtgatgatgtcatcgagttaacgccatcaaatttcaacagagaagttattcagagtgatagtctgtggcttgtagaattttatgcaccatggtgtggtcattgccaaaggttaacaccagagtggaagaaagcagcaagtgcactgaaagatgttgttaaagtcggtgcagtcaatgcagataaacatcagtccctgggaggtcagtatggtgtccag

SEQ ID NO: 372 - DNA, 255 bp, Rattus sp.
actagctgtgttctgcatccttggcaccttcccctgcataagaagctgccccggtgagcaatgatctcaggccgggatcacttagcaggggtcttccagccagaatggatacccctctaaacagcaggagggtgtgagtgcaggcaatgtagcatgaggaagagacatggttcctgagcaggcgtaaaccctaagcaaaggaactccgttcacgtcactgccgcacattagaaatgaagcaatcagagctcaaca

SEQ ID NO: 373 - DNA, 255 bp, Rattus sp.
accccattgccgatttggtgaagatgcttaccgaacaaggcaagaaagtcaggtttggaatccacccagttgcgggccgaatgcctggtcagcttaatgtgctcctggccgaggcaggagtgccctatgatattgtgctagaaatggatgagatcaacagtgatttcccagataccgatctggttcttgtcattggagctaatgacaccgtgaattcagcggctcaggaagaccccaattctattattgcaggca

SEQ ID NO: 374 - DNA, 232 bp, Rattus sp.
  modified_base (161): a, t, c, g, other or unknown
actgcatgctgtttgtcgcactttatcttcaagccaggatgaatggagattgggcaagactcttacgacccatgctacagtttgggcttgttgctttatccatatatgtgggcctgtctcgagtttctggattacaaacaccactggagcgacgtgttaantggcctcattcaaggagctgttgtggcaatattagtggttttgtatgtagctgatttcttcaagaccacag

SEQ ID NO: 375 - DNA, 255 bp, Rattus sp.
accgtggggcaagtgaaaagtgattgcggccattggttaatatgtcttcctttttctttctccagtgttctagttacattgatgagaacagaaacataaactatgacctaggggtttctgttggatagctcgtaattaagaacggagaaagaacaacaaagacatattttccagtttttttttctttacttaaaactttcaaaacaatagaaactttgtctttctaatcttatactttaaaccgattaaatcttt

SEQ ID NO: 376 - DNA, 255 bp, Rattus sp.
acctagagggactgccgtgcttttgctcacttttacctgcctacttctacatgaggcgaagttggtctttctttaggcgtctacatgaattctaacttatgcattagtcatcaaaatggttggctctaagtggtagagaaaggagacaccttaggtatcatgtaggtcaactttttttgtgtgtggaggaggtgaacttcacggccacaaataaacagggtttgggctttgtccagatggtagacttaataaaat

SEQ ID NO: 377 - DNA, 251 bp, Rattus sp.
acaagggcgaggggctgaacaagacagccattggggactacctaggggaaagggaagagctgaacctgtctgtgctccatgcttttgtggatctacatgagttcaccgacctcaatctggttcaggccctccggcaattcctgtggagctttcgcctccctggagaggctcagaaaattgaccgaatgatggaggcctttgcccagagatattgcttatgtaatcccggggtcttccagtccacagacacc

SEQ ID NO: 378 - DNA, 255 bp, Rattus sp.
acagtggccaaaggagtctgtaacaacttctcaaatactgttagcatctttgggtttgctgaggcttgtcagtgatgtcaaatcctccaagaaaagatctgcttagataactaggactaacagtttcgtagtaataatccaattttataatttgcctttgcaaatctgcctgaagctacagggaatggaaattaaagcaagtgtaaaatgggtagtctgacatttaaaaaaattacataaagaggaggttaaagt

SEQ ID NO: 379 - DNA, 250 bp, Rattus sp.
acacgcgagttggcaagtgctccggccattccagcttcatcacccacttggactggtccgtgaactcacaattcctggtgtcaaattccggggactacgagatcctctactgggtcccatctgcctgtaagcaagtcgtgagtgtggaaaccacacgggacatcgagtgggccacctatacctgcaccttgggattccatgtctttggagtgtggcctgagggctcagatggaacagacatcaatgctgt

SEQ ID NO: 380 - DNA, 221 bp, Rattus sp.
acctggagggtatgatgaacgaggccccgggacctatcaacttcaccatgttcctcactatgtttggggagaagctgaacggcacggaccccgaggacgtgatccgcaatgcctttgcctgctttgatgaagaagcctcagggttcatccacgaagaccacctgcgggagctgctcaccaccatgggcgaccgattcacggatgaggaggtggacgagatg

SEQ ID NO: 381 - DNA, 255 bp, Rattus sp.
gcgtggtcgcggccgaggtacatgggggtggggatgaaggttggtgccacgtcgttgcggagaaccacctcaggcctggcctctagtccccggtggagttgagtgatgtcatagtcctggtcctcttcgccaccaccctcttctccataatagaagacattgtcacgagtgtcatcctctgggagcagaaggggctctttgaccttcctcttctttctcaccaacagaaggagcgccagaagaagggtcagtaga

SEQ ID NO: 382 - DNA, 255 bp, Rattus sp.
acacttgtagaagatttgtaaaatgtaaggttttttttttttttttttaatggtccattccttcatgggagcgtgtgcgcctgggctgagagcgtggggatgcacagatgttctttctagaacatattcgttgcaacagctaactttgtgttttcatggttttttatgttttgttttgtttttttgaaaatgagagaagagctggagagatgatttttatgatttttttttgttttgttttttactatttatagc

SEQ ID NO: 383 - DNA, 255 bp, Rattus sp.
acctggctttgctagcagtcttgatccagacaggactgatgtgaaaagggttggactctgccatattccctgctgagcgtatggttagaccacagcagagaagtcctggaataagacacttgctcctcagaggacagttctggagtgaagggagtgtgtacccagtataaaaagaaggaagaaatgttgaaaaagtatagaaacgccatgttaaagagcatctgtgaggttcttgatctagagaggtcaggtgtg

SEQ ID NO: 384 - DNA, 255 bp, Rattus sp.
gccgcccgggcaggtacagaacccagaggaaggagaggctgctggggtggaggcctaggcgctggagacatgtggagttctctaggggtctgcagcaacctcggaaagctgggagattccttccttgagactcctacatatagaaaactgatgcttctgtctcattccatgcggcttttcctgcggtattcctgtagcgctttctctgccactgtgtccataaacttagggttatccttggagacttcttctggt

SEQ ID NO: 385 - DNA, 255 bp, Rattus sp.
acagcagcctaaaaaagggcaagaaatgcagcaagaccaagaaatccccagaaccagtccgatttacttatgcaggatgctccagtgtgaagaaataccggcccaaatactgcggctcctgcgtggacggccggtgctgcacacctctgcagaccaggaccgtgaagatgcggttccggtgcgaagatggcgagatgttctccaagaacgtcatgatgattcagtcctgcaagtgtaactacaactgcccgcatc

SEQ ID NO: 386 - DNA, 255 bp, Rattus sp.
accatccctgaaagtgtcgggtattccctgcttcccctggcacccattggaggcatcatcggatggatgtttgcagtggagcaggatgggttcaagaatgggtttagcatcacagggggtgagttcaccagacaagctgaggtgaccttcttggggcacccaggcaagctgatcctgaagcagcagtttagtggtattgatgaacatggacacctgaccatcaacacggagctagaaggccgagtgccacagatt

SEQ ID NO: 387 - DNA, 250 bp, Rattus sp.
actgaataccctgaagcagaacagggcaaccaactgtcaccatttaagagggaagtctcaaaacatcccgcggggcgatgcttggagaagctgtaagttgagctgaagctgagaacttgactccagagcagaaggcttaagggtgaaatgaccactcagaaatggagggtctgctaacatcactggggtgtggattgaccttggtagagagacacttgttggcttgggctggatggaaagattactctct

SEQ ID NO: 388 - DNA, 255 bp, Rattus sp.
acctgtctttctcctggcatctccactcttccaggaggctcaccttagtgtgcgttctgtcactgtgcgctagtgaacaactgtcaagtctaaactgtctcgaaaccagtgtctgagattgacaggctatttgcatgacaatgacacacggttctcacttcggtggggtgttttctcccacagcagttaggaacccagatttaaattaatgtgctattgtaatcctttttgtttttttacagaagaaaatgagat

SEQ ID NO: 389 - DNA, 255 bp, Rattus sp.
acggcagcaaatcttattctgtttgttttgcaataaaggaagtgagggtggctggctagccagggcaggcaggccacaactttcacttctaggaatgctttaagagacactaaagggcaccttggggcaggaggcgagtatccggttggcagaggagcagaggcaggtctgaatgaaacctttctggggtcagctgtgaggatacaacaggaaaagcatgtgatgttagggggaacactgagctggccctgctgg

SEQ ID NO: 390 - DNA, 255 bp, Rattus sp.
  modified_base (45): a, t, c, g, other or unknown
  modified_base (47): a, t, c, g, other or unknown
aacagaccgcctatctggaggacgggcccatggccttgctgcagngngccatggaggaaaactgcctctcagcctccgctgtgcacaccgatcccaccagaggccaccgtcgccttctacgcttctcttcccagatccacaacaatggccaatctgacttccgccccaagaatggccgccatgcatggatttggcatgactgccacaggcactaccacagcatggaagtattcacttactatgacctcctgagcc

SEQ ID NO: 391 - DNA, 255 bp, Rattus sp.
accctgctggccggccagatggaccttgtgaatgaaattccctttacctacgagcagctcagcatcttcaagcacaaactggacaagacctacccacaaggctatcccgagtccctgatcaagcagctgggccacttcttcagatacgttagccctgaggacatccggcagtggaatgtgacttcaccagacacagtgaatactctgcttaaagtcagcaaaggacaaaagatggatgctcaggtgattgccttg

SEQ ID NO: 392 - DNA, 255 bp, Rattus sp.
acttggacgagctttgagcatttaagctacaacttttcatgcagctccaagacagaatagaagctagcagttaggtttccatgcacttctgtgtcattacattgaaaatggtttgtcttaaggttttagcactgggcaaataaaactactagcaagaatgaagttatagtgtgaaaagctttaaacttcgtaggtctagggtaggtgaaaagagtcttcaccaaaaataaaggcagaagaaaagtcatagtttga

SEQ ID NO: 393 - DNA, 250 bp, Rattus sp.
acggcccgtcagaacagggccagctcagcagcccagccagtccgatttgatgcttccaaacttcacactcttcagactttggttctccaacttcaggtaataagcacccttgaagaaatagctgtgaccaccaccctgcaggtccacgactgcatccaggttatcagggatggcattccaggagtctgcgatgagcttcgggaaaccggggtccattttcttctttacttcattgtatctccagaacttg

SEQ ID NO: 394 - DNA, 255 bp, Rattus sp.
accaaggatcaaagactgagacacacagtgctcaggccggcagagggagggggtatggcagggaccctggcccgcctgtccctctagacccactaccatgtttagggaaaatgggggtgggggggcagaatcacactagccgtgaacccacttggatgattgatgttttattcatgctgtttccaggaagggatgtcaaagctggaccagtctgaaccctcagaggcttttcaattggccacagggggctctgtc

SEQ ID NO: 395 - DNA, 255 bp, Rattus sp.
acactgtgagaagctggtgtttaatttctatgacccttggcaggaatgttacaacactgcctagcagcttcattagaaaacaatggaagcaaaaggttaagactgattactactcttctccatgtattgggcaagaaactgtaacagaatggggaggaaaataagtaacgcttcaaaaagtgatcatctttaccagatcacaagctagactgaatttcccattagagtcagttctcaataacaaattatcaagat

SEQ ID NO: 396 - DNA, 255 bp, Rattus sp.
accactgtgaggcgactgtttttgcacgaaagcatccatgatgaagttgtagacagactgaaaaatgcctactcacagatccgtgtcgggaacccctgggaccccaatatcctctatggaccgctccacaccaaacaggcggtgagcatgtttgtgcaagccgtggaagaagcaaagaaagaaggaggcacggtggtctatgggggcaaggtcatggaccaccctggcaattatgtggaacccaccattgtgact

SEQ ID NO: 397 - DNA, 255 bp, Rattus sp.
acagcatggctgatatcagagcagtttttaacggtccctatgctcataaggaaagtgcagaccatcgttgggtgtaatatgatggaaggataccttatccccgacccggaacgtgtcccagcaaaacctatgatccactgattaagtccacccgagacttcccagatgatgttatcagtttcataaggcggcacccggtgatgtataagtcggtgtatccagtggccggagcacccaccttcaagagaattaacg

SEQ ID NO: 398 - DNA, 255 bp, Rattus sp.
  modified_base (88)..(89): a, t, c, g, other or unknown
  modified_base (91): a, t, c, g, other or unknown
  modified_base (96): a, t, c, g, other or unknown
  modified_base (107): a, t, c, g, other or unknown
  modified_base (112): a, t, c, g, other or unknown
  modified_base (118): a, t, c, g, other or unknown
  modified_base (154): a, t, c, g, other or unknown
acctatacctacgaggggccccgaccccattggggcaggagcactggttttgaagagatccataaagttcgcctgagggactgcaggnngncctgngggggacatcnggccnggaggntctgaggcaaagatatctgaagcaagcaggtcgttngctgaagactgacaaaaggaaggagggagaagagttattcagcaagagggaaaacacagcttctgtctcactcctactaacaacccaaagctaacagccat

SEQ ID NO: 399 - DNA, 255 bp, Rattus sp.
aggtactcaaatcagtccaggcacaggagctggcaaaagctaaaaaacagctggaaaactggtccttccagacctagggtggtggtaaaaatccacataccggagtcaggaagattccaattcaaagacaaaggaatatgcagaggccccttggcagtgggtcctgccttccacagcaggggaggaaaaccaagaaaagagctgccacatcctccacccagtcccacccgtcccctttgacagcaggactcagtg

SEQ ID NO: 400 - DNA, 250 bp, Rattus sp.
acccaggctatacatgactgtcgccctagccaggactgccataaccttcctggctcctatcagtgcacctgccccgatggttaccgaaaaattgggcccgaatgtgtagacatagatgagtgtcgctaccgctactgccagcaccgatgcgtgaacctgccaggctctttccgatgccagtgtgagcccggcttccagttgggacctaacaaccgctcttgtgtggatgtgaacgagtgtgacatgggag

SEQ ID NO: 401 - DNA, 255 bp, Rattus sp.
acaagctttttttttttttttttttttttttttgatggctatcaagtgcgttttattgaatccattgtggatagatgagtgttacacctgcgtgtcgggaggggcagaggggcaaggagggatacagctgcagatggtggagcacgtcaggatcagaaaccagaatcctctatcaagtctggagacgaggagcattaagagcaatgatgacgacagtaacaatagtgataatgaccatgaggatgctgaggacca

SEQ ID NO: 402 - DNA, 254 bp, Rattus sp.
actgggcctcaccacatccagttactccgatccaactatcggctacgagaacaaagcgctgatcctctgtggaggctacagtgtggtagatgtcaccacttttataggctctaaggcccctattccaggtacccaggagaccaatagttccaagaccccctccctctttccctgtgcctcaggggccttcagcagcttccgcgtggtcatccgccccttctacctcaccaactccactgacacggagtagatgg

SEQ ID NO: 403 - DNA, 255 bp, Rattus sp.
  modified_base (163): a, t, c, g, other or unknown
  modified_base (243): a, t, c, g, other or unknown
acacgaaaacagtcccaggagagtattaagacattgctttggtcttaaaaccacaaatcatacatgtgacccagtgcaaatgaagagtttaagagataaagggaggggaaggggaaaatttaaaacatagtgggggaatgggggagactgttgtaacgggagncaccctgtgaggtggctgaagggtgaagaaagcacttgaatttttcccaaataagggaggatggagggaaacaacctgtnttcaaaaatgtt

SEQ ID NO: 404 - DNA, 255 bp, Rattus sp.
accactgaagcactactagacttcacccaaggaatgaactagccactcagacacagtggccctccatgtccaaatggacttgaagagtattgctgacagaagcacccaggattctagctagtcctaaagcaatagcaggcaaaggaattcccaaacaggaatctggaactggaaatctccatatctttttggaagtgggaatgaagagccatatataaataaagatgttatttctgaacaatttcaattgttccc

SEQ ID NO: 405 - DNA, 255 bp, Rattus sp.
acaccagttgaggttctaagacctggaagccacagaagcgcagaatgccactctgaattggccagagaatgacgttcatgtccccgtggacaccctgcagagagtacatggagccgctgcccccggtggtgatggaaagcaaggtcttcttattctggaaaggacccttgtcatacatggtggcatacgtgtaggcgaatcctgctacaagcactctctcaaaccagcctttcagaatggcgggcaccccaaacc

SEQ ID NO: 406 - DNA, 255 bp, Rattus sp.
acaacagattttgctttttatttatttataatgtaattttatagaataattctgggatttgagaggatctaaaactatttttctgtataaatattatttgccaaaagtttgtttatattcagaagtctgactatgatggataaatcttaaatgctttgtttaattacaaaaacaaaatcaccaatatccaagacaggaagatatcagttcaacagcttactgaagttaggaaactaactccactcgtatgggaac

SEQ ID NO: 407 - DNA, 255 bp, Rattus sp.
ccaaaggaaagatacgggacaagccactggcccctcgaaccatctgcctttggaaatcaaattttttaatataaatgttatgattgaggaccacatgcatagaaaaatggtgcaaaaaccgagacagtatcatcagctttatcaactgtaaccatgggttggttcttccgggccagtcccagtctgttaagaggcaaaagaatttggaaatgttacctcacagaggcacgggtctttttgcagttgccaacctgc

SEQ ID NO: 408 - DNA, 255 bp, Rattus sp.
acacgacgctgccaagggaagctcggatcaggttatactaatcctatcagtctgcatgccctcaaacgtccctcaccatggccgtgcgttcttcatccttgcggcttaaggtcccaccactcttccctttgcatattccctttggagaacagcaaggtgagcttccttagcataccaccccagggaatgatgcagagttagcaatagacgcaaatgaactttcccaggaaatcacttctcagacccacaaagtgt

SEQ ID NO: 409 - DNA, 255 bp, Rattus sp.
acatacattgtatgggtttaagctggctggatattatatatttcaagtttaaaaatgcactacagatagagtgtccatagtttaaggcgaaattacagctcagaactgttgtcctttctaattttgtggaagcttctttgacaaattaaaaaataaaataagagagactcagatgttcataacacatagacgatttcccttcattgtaagttcactgtggacttttcctccatttaaatatttcgtgtgccaagt

SEQ ID NO: 410 - DNA, 255 bp, Rattus sp.
  modified_base (19): a, t, c, g, other or unknown
  modified_base (181): a, t, c, g, other or unknown
accgcggcctgggcctagngacttaacagtagcaacagcagcggcggcggcggcagccgacttcccgattcgagcacaggcgcgcgaaaatccgcacaggcgagtagagaaaatggcagacgatattgatattgaagcaatgcttgaggccccttacaagaaggtgagaaaacatgctagngagctgcaatatatttcttaatttagcattattcacgaaactactgctgaaatgtaaactaaccttcccggagc

SEQ ID NO: 411 - DNA, 237 bp, Rattus sp.
actatttttggccaacagaatttgcaaaaaaatgtaaaatttaatataatcattttgatgggatgagttttactgtcattaaaaatattggaaagcacaagtattagtatctgtcgtgaaaaaccaattttagtcagaggcgtgtttgtgcccaattaggtatcatgtatgtagttgtaaggatgtagaactcaaatcacacagggctctgcccagagacaccgagttcaacagtgg

SEQ ID NO: 412 - DNA, 255 bp, Rattus sp.
acgttatcaaatgtcagcctggatactgtctacaaggagatggtgacgaaagcccaacaggaaataaccatccagcagctaatggctcatttggattccatcagaaaagacatggtcatcctagagaaaagtgaatttgcaaatctgagagcagagaatgagaaaatgaaaattgaactagatcaagttaagcagcagctgattaatgaaaccagtcgaatcagagcagacaataggctggacatcaacctggag

SEQ ID NO: 413 - DNA, 255 bp, Rattus sp.
tttttctggtgcactccaagtgctatatgcctggtttattcttcaggaaattatatttgtttttcttttacaagagcacaacaggaaccaaagtagaagagtaacagatacagcactcaggataaatcatatctttaaaataataaaaaaaaatttacaccttgtcctatatcctgttagtattttcatatgggcatgattgaaaaaaaaaaaaacaacaacaaaaaagcaagcatttacaatttttttttcgat

SEQ ID NO: 414 - DNA, 255 bp, Rattus sp.
acagggggaatggggttgtcttatgaatataaacctgagttgagcctcagtttcctggtcttttctatcccctaagaggcttgaggatatggcctagcattcagtgggagctggcacctcttcccacactacctgtatggactggccggtgctcctctgaacgtattattagtgtaactctttattttgtgtatttgttacatcatgtgtgtgattgcctttgttaagggtgtctgaggagtatgggctgacagg

SEQ ID NO: 415 - DNA, 250 bp, Rattus sp.
accctggaggcccaaggcccccgttgagaatacctaatcaggcacttggaggtgtcccaggaagtcagccattactccccagtggaatggacccaacacgacaacaaggacatccaaatatgggcggaccgatgcagagaatgactcccccaagaggaatggtgcccttaggaccacagaactatggaggtgcaatgagacccccactgaatgctttaggtggccccggaatgcctggaatgaacatggg

SEQ ID NO: 416 - DNA, 255 bp, Rattus sp.
acctacccagaagaaagaaaaacttgcctctctggccaaacagctgctttgtcgagcatggcctcatggggacaaagagaagaaccccacttttaatgaccacctccatgacttgctttgcatctacttggagcacacagacaatgttctgaaggccatagaggagatcactggtgttggtgtcccagaactggtcaatgctccgaaagatgcctcctcttctacattccccacgttgaccaggcacacctttgt

SEQ ID NO: 417 - DNA, 255 bp, Rattus sp.
acctaaagatcctgacaggtcttgctgaagttgctacaacaaatggccataaactgcttagtctgtccagcagctacgaggcgcagatgaagagcctcctgcggatcgtgaggatcttctgccacgtcttccgcattggcccctcgtctcccagtaacggcatggatatgggctacaatgggaataagactccaaggagccaggtgttcaagcctttggaattgctttggcactctctggatgagtggttggttt

SEQ ID NO: 418 - DNA, 250 bp, Rattus sp.
acagaacccccagggcagccccacacttggcagggtccataaagacgaggcagctccgtccatcctggaggaagatggtggctgggaccctgctggctgtgcactcgggctgcttcagactttgctccctccctagtccattgccagacccaggaagaaggctcatgtctgcactggggcgatcacagaaatgcctgttgtcaggggattgtggggagcagtggcttgtctggggtagagggcagaaggc

SEQ ID NO: 419 - DNA, 255 bp, Rattus sp.
  modified_base (30): a, t, c, g, other or unknown
  modified_base (60): a, t, c, g, other or unknown
  modified_base (146): a, t, c, g, other or unknown
  modified_base (171): a, t, c, g, other or unknown
acaaatcccacaggtgagggagactactgngtgggaagaaaagctctagatacgccttgnggacattccgggtttctgcagtggttaaagaaagacacactcaaactatgcctggatgatggaagctgctcactcaggcgataggngatcaatccactttttctttggttnggactagaagatgagggtggagtaagcaggaaggggatagatcctggaagaattgtctggaattttccagagatatcagtaata

SEQ ID NO: 420 - DNA, 255 bp, Rattus sp.
gggaaaagtctaaacatagcaacagtgaacataaagattctgaaaagaaacacaaagagaaagagaaaaccaaacacaaagatggaagctcagacaaacataaagacaaacataaagacagagacaaggaaaaacgaaaggaggaaaagattagagctgctggggatgcaaaaataaagaaggagaaggaaaatggcttctctagtccaccacgaattaaagacgagcctgaagatgatggctattttgctcctc

SEQ ID NO: 421 - DNA, 255 bp, Rattus sp.
actgcgcactccccaggcacagagcaccaccaagtgccttagaaccttccctgacagagatggggctctgcccctgaggagcttacaatccggggatctacaactcaaagcccgagttggacagcgagctaatttaaggcaaaaacctccgtcccctagagctattatagatggaattattttagcatttggaattaagccaatgaagagagaatttggttgtggatttaatttggttgtggatttttttcaggt

SEQ ID NO: 422 - DNA, 255 bp, Rattus sp.
accctcacagaatagcaaatacccttctgctctggacgttggttcagatttgaatttggaagtaatttccttggaagtccctgtggcaggtcagagaaatggaaataaaagttactataattcagatttatgccttattttttagcattttttaaatgttgggtctttcaagctgttttttgctttttattagatctatataaataagttaactagcaatttagttttgtatttaagctacaattaatctttttc

SEQ ID NO: 423 - DNA, 255 bp, Rattus sp.
  modified_base (74): a, t, c, g, other or unknown
  modified_base (174): a, t, c, g, other or unknown
  modified_base (196): a, t, c, g, other or unknown
  modified_base (228): a, t, c, g, other or unknown
actataagcagtatgttacctatactgtgtgtccttgctgggcgtctattcctttgccctgcctaggacaaagngtgcaactctgataagcctgtttaaaagaaaaatactaacactaccaaccaagcagacacagtatccaaactcaaagtgcaaaatcactgaaccaaaggngatgatgttgaagaattacagnggttagaaacaaattccaactccgttaggcangcggagaagatgtgctcacagactcat

SEQ ID NO: 424 - DNA, 255 bp, Rattus sp.
actggtcaccactggattcccgacacatttcagtcacgagcccccagaagagacggatggcccaccgggagctatcgctttagctgccttcctacaggctctggggaaggaggccgccatggtggtagaccggagagccttgaacttgcatacgaagattgttgaagatgccgtgaagcaaggagttctcaagacaccaatccccatattaacttaccgaggaggatccgtggaagatgctcgggcatttctgtg

SEQ ID NO: 425 - DNA, 255 bp, Rattus sp.
actgtaggctctgggaacaagaacactgggttcgattcatgacttgagagacttaagttacccaaaacattaagattttaaaagactaaaagtagtgagggaaaaaaaaacaataaaaattgcaagcagagacttaactaagagttttacaattaaaaaaaataccaaatttaaagtatgtcagttttatagaacttgtaatttggactgcaaaaggaatgcttaaggaattcacttccttcgctcagtattttt

SEQ ID NO: 426 - DNA, 255 bp, Rattus sp.
actgtgtttgtgtaaatgtgctattaatataagtatttacgtgttcctaaatattcacagactctagttgcaaggtcaaaggcagcttatgatcccctgagttaaaaaataaatggtgacctgtcatctatgaccttaaactggcagcaagaaaactagcagaggtgtgcaactgtctggtagtggagtaatggctttctttctatgtccttgagcttgatctatgcagaagagagtagaccattaagggaagag

SEQ ID NO: 427 - DNA, 255 bp, Rattus sp.
accagcaagaagaccacccagatgttgtcacctgccctgaacattacaggcaaccattaaatgtttattgtctactagataaaaaattagtttgtggccattgtcttactataggtcaacatcatggccatcctatagatgaccttcaaagtgcctatctgaaagaaaaggatacacctcagaagttgtttaaacagttaaccgacacacactggacagatatcactcgccttattgaaaagcttgaagaacaga

SEQ ID NO: 428 - DNA, 255 bp, Rattus sp.
acctggaaaaccaacattctgaatgtatggacactggacatggggttacccatgaggctttcaaaagaatccaagaatttgctctctaccctacccagtagtgtgatggcatcactagtgccaggtataggactaaagtgagtattaggttgaatattgatgtagactctttgtgtgtcctatacctcttaatgcataaattcttaaatttgtctttagagtccagttggcctgttaatggtgaatttcctttga

SEQ ID NO: 429 - DNA, 250 bp, Rattus sp.
acgagactcttgggcttgtttgccgccaaggcttactttccaaggttgattcctagaaccaacagaatggaacaagagaatgcctcctgccaacggtcctggcttgcagagatatgccgcagtgcaccttcccacagaaagagacacacacacacacacacacacacacacacacacacacacacacacacaccaaggaaagcctccaaaaagagattctcactgtaaggaaggatgtaaagaaaataga

SEQ ID NO: 430 - DNA, 249 bp, Rattus sp.
  modified_base (82): a, t, c, g, other or unknown
acttttactgtaaacggggcaaaatccagactgttcaattgttattatcccaaactgagcaagttttaaagttgtttttatnttaaaaagccatcagtaataatctggaattttttacttttaaagctgcttagcctcaattttaacagattctgaaatgtcttaattgatgtaattagtgaacttaattactctattactgttttctttaaagcatttaataaatacctgttgactgcctaggaagag

SEQ ID NO: 431 - DNA, 255 bp, Rattus sp.
caagcttttttttttttttttttttgcctatttgatttattttattttactttataagtaactggcagaaacacaggaataaatatttctataaagtggctatcctaaaaatacttgtgacgattatctgaatcatttggtcctaaaaaatgttgctttaaaaatcaagttcagcctaattggaggtaaatttaatcatatccagcactggaatattttattctgcttttggctgtaggttatacttttgtggct

SEQ ID NO: 432 - DNA, 255 bp, Rattus sp.
acattggttgcttgctgtttcacactttggttaagtgctgacatattttgatgtaatgagtaggcagccagaagcagccagaaataattgatctgtcctctggtaatgccaggttttccaacatttgacatcccgttgaggaggggaaaggctgaagatggcactgggggacacctgtggcatctagaccccatgtataccggcgtatgactttagggcacatgtgcttgggcggagacgtggtaggcgacagga

SEQ ID NO: 433 - DNA, 255 bp, Rattus sp.
gtcacacagaccgtatgtaaagaggcatccaccacaaggggagcagtgcagtgttctgtttgtaggggtccaggaagaatcaatgcctccaacagtggacaaatactaaaagtccttacagcaaaccatatgttgttagcctcgtggttactgcttaactgcaaacctgttgagtaatcaaccttataaacaatagctagacagtcataggcctttaaaacaaatgatctaataacagcaaaggagagataaatt

SEQ ID NO: 434 - DNA, 255 bp, Rattus sp.
acacatagatacaaatatcaatggtcagttcctgcttcactctcaaagaagtggttgctcacgtctgaacattttggctagaaaacaggccagtgttcaatgctaaccttcagtatgtctgactacacagagaagccagggcatgtgcggcactaacatagcccactagtcccactgcggccacactgctgtgctgctgtaggtagttcaggttactgattcactgagtaaacacacacctagaaactatagcaa

SEQ ID NO: 435 - DNA, 255 bp, Rattus sp.
acagactcttgtatacagacggaaagttagcaaggactcaactcgaccacatcaagttttcttgaaaagtgtttactttaaacacttaaagaaaaatataacttatctacatgtttgaatagtctagaaggaaaaacaaagccaccgtcaagaccctgtggagttgaagaggacacggaaacgtctcaatgaggtaatccttccactgtctctaaaagtccgacagaaactgagtgagctcacgaggacagattt

SEQ ID NO: 436 - DNA, 255 bp, Rattus sp.
acaagaaatcctcaaagaaagcggcgtggtggagctgtgaattctagacaaacccagaagcgaactcgggaaacaacttcaacccctgagatttccttggaagcagaacccatagaacttgtggaaaccgttggagatgaaatcgtggacctcacctgtgaatctttagagcctgtggttgtggacctgactcacaatgactctgttgtgattgttgaagaaaggagaaggccaaggagaaatgggaggaggtta

SEQ ID NO: 437 - DNA, 255 bp, Rattus sp.
  modified_base (63): a, t, c, g, other or unknown
  modified_base (118): a, t, c, g, other or unknown
  modified_base (155): a, t, c, g, other or unknown
  modified_base (169): a, t, c, g, other or unknown
  modified_base (200): a, t, c, g, other or unknown
acaggtgcctgtgctatgatgggttcatggcgtctgaaaacatgaaaacttgtgttgatgtcnatgaatgtgacctgaatcccaacatctgcctcagtgggacctgcgaaaacactanaggctccttcatctgccactgtgatatgggctactcntggaaaaaaggaanaacgggctgcacaaatatcaatgaatgtganattggagcacacaactgtggcaaacatgctgtgtgcacaaatacagcagggaact

SEQ ID NO: 438 - DNA, 255 bp, Rattus sp.
actaaagcaacttgctgactgctgctttctttctcttatacagaattggcagagggggtcgatttgggaggaaaggtgtggctataaactttgttactgaagaagacaagaggattcttcgtgacattgagactttctacaatactacagtggaggaaatgcccatgaatgtggctgacctaatttaattcctgggatgagatagtttggaatgcagtgctcgctgttgctgaataggcgatcacaacgtgcatt

SEQ ID NO: 439 - DNA, 255 bp, Rattus sp.
  modified_base (88): a, t, c, g, other or unknown
acatgatgactccacaatagttgaagctaagctatctgaagctatagagcctgaagttgggccttgcggtggttctgctcatgttganccctgtgatgattccactcacatttctgtgcaagaggaaaacaagtcgtctgtcagtcattgcctccttgatggctctacagttcctgaggaaggcttatttagccaaaagagtttccttgttttgggttttagtgttgaaaatgaatgtaatattgtaaacatcat

SEQ ID NO: 440 - DNA, 255 bp, Rattus sp.
accgcaactaccatgctcggcccttttctgtgcggttttccaggctgcagataaaaccggccgatctatactgccggctccaatctgcagaattcaggacaccttgccaaaagcaatgaaggcctggctggactcttgttagagtgctgaacggtgggggtctttacagttccagtggactagggaaagggatgttgaacgaattaggtttgcaaaggggccggaacttttgtttgtctgtttgttctgttttgt

SEQ ID NO: 441 - DNA, 255 bp, Rattus sp.
  modified_base (131): a, t, c, g, other or unknown
acagtcaaatgaacaactgtccaatctgtcatcctaatttggatatgtgtgttaatagaggtttgctatttttccaggagggtttttttaagtacaaatttctataaaagtgtttccattatattagcacnccctacccgataaatcacatgatttttgtttcaaatttcaaccttaaaactaccttcaaccgtgcttatcctatcaaaatattatactctaaagacatttgaaacctaaaactgctcattgtat

SEQ ID NO: 442 - DNA, 255 bp, Rattus sp.
  modified_base (50): a, t, c, g, other or unknown
  modified_base (175): a, t, c, g, other or unknown
  modified_base (194): a, t, c, g, other or unknown
acagttaatacattctacacaaaaacattgcaatatttgccactattgcnggcaataattacatgaaacagtttaacagtttatggggtggtcacagtgcacatattactagcaactagggctaagaaggaatcatttagtgttaaagttttattggaatttggccaggcagtcnatgctatagttagtaaacncatttggagacaaatatcagagtagctcaagccatttgcaatctgaaatgattcctatatg

SEQ ID NO: 443 - DNA, 255 bp, Rattus sp.
gacgcagtacaagtccaagtttgctgacctctctgaggctgccaaccggaacaacgatgccctgcgccaggcaaagcaggagtcaaacgaataccggagacaggtgcagtcactcacctgcgaagtggatgcccttaaaggcactaatgagtccctggagcgccagatgcgtgaaatggaagagaattttgcccttgaagctgctaactaccaagacactattggccgcctgcaggatgagatccagaacatgaa

SEQ ID NO: 444 - DNA, 255 bp, Rattus sp.
gttgtataatgtaaatttatttctccaaattgagagtgatttttaaaaattttttatctttatatggtttcagaagtatgaaccagctttctttttattattgtgggaaacattttgttttataacatagttgttgactctgttaataatggacatgctaggatctggatcactttcaattgaagtcagggtattgtgcatagtgagtaaaaagtgttgggactgaaaattgattaccacagaaggccaatgcct

SEQ ID NO: 445 - DNA, 255 bp, Rattus sp.
acattgttttaccctgtattcattaagacatttcctgaaaagtagcctaacctatgccaatattagctacttgacaccatgtgaaactaacttgtttttcttcgtgtgtatgtgtggggagagagaggaggggggacagacagacagacagggtgactttgggtgtgagatatggatgctatgtaggccacactggcctagaactaaaaaatctgcctgtctctgtgtcccagttgctaggattaggtatccgct

SEQ ID NO: 446 - DNA, 255 bp, Rattus sp.
acacagctttaattccagcactctacagaataagttccagaatagccagggctatgtagagaggccctgtctcaaatcaaaacaaaagtggggttggagggaggagtggtgaatatgtgtctcagagtaattccatctctagaaacagtcagtctcaggtcagtctgtgtgggtaggaggtgaagggtgaattgagtcaggatgccacccagagccaacagacagtcttttgactataatgaaagccagttaatt

SEQ ID NO: 447 - DNA, 255 bp, Rattus sp.
acaaatttacattcaggaggaatgttaaaaaaaaaaattcaactaaaaaaaccacttcttcctgtgacccataatcccaacattttacagtgcaggggagagggaggcttgggggagcatccaaaacaagtctctcaaaagaaataactttaaaatgtcacattccctctccacacaggattcatagtgagggtataattacaattcatccttctctgtaggttccttttctgtttcctgttcttcttcttcttc

SEQ ID NO: 448 - DNA, 255 bp, Rattus sp.
accaccacaaacccttcaggggagactctgttcttagaacagggaatccctttcctcttgccctgactggagtggcaaggaggtgttctgagctgagcggctgttccggcaccagcagccactctgacagggcagacagagcaggagtgcattggtgtctctagggactgctggcctttgagctgctgaccttccctccctcccatagaggcttgggaaggaaaatgagcgggcagcattaagagctgctagtga

SEQ ID NO: 449 - DNA, 255 bp, Rattus sp.
acaagaaacatcgggagtgaatactgaagagctgcaagtttctcaaaatccaaaggaatgaaccaaaaaaaaaataaaaaataaaataaaataaaaaaatgtgttttccgatgttcaaatttcctctctaagcgcaggtaagaaaaaaaagagcaaatatattaagtcaaccaatttttaaaagtgcaatttacctttataacaatgaaaattaacaacaaacccaaaataccgacccttaaccccaaagacaaa

SEQ ID NO: 450 - DNA, 255 bp, Rattus sp.
  modified_base (50): a, t, c, g, other or unknown
acagctggaccttagtaaagctcagttccacagtggcctatacactgaancatgctttgtgctggccgaaggttgctttgaaaatcaagtgtttcatgccaatgcctttggatttcctcccacggagccctctagcaccacaagggcatactatggaaatattaatttttttggagggccttctaatgcgtcagtgaaggcttctgcaaaactgagacagctggaagaggagaacaaggacgccatgtttgtgat

SEQ ID NO: 451 - DNA, 255 bp, Rattus sp.
  modified_base (158)..(159): a, t, c, g, other or unknown
acaacactgactttttagacacgacagtagttttaagtttattgacacttaaactctttcttcttgatccaaaattctttactcagtcacacaacaaatgaggtaatatttgtatataagttccacctttgtctcttttgggaaaatgaaataaaaanngttgattgtgttttcttctccctggaaataggcagaaggggtggggtgggtgagccttggagggctcaggcttcctttgcaggaaaggcaaatgca

SEQ ID NO: 452 - DNA, 255 bp, Rattus sp.
accccaatacttcccttcaagttgtagaaaatggtaaagaaagggcgtgtccaggctgtttatcagtccagggaaaaatagaaatctccctaaaaggcagggacctgaaggaatggtgggcaaaggtatattggaatcgctcatttgtttgtgaatttttttattgaacccacctactcaaagctagggcaccccggacctttggcccatccacaccgttctccatctgggggactaaccctgtttcaaaaccag

SEQ ID NO: 453 - DNA, 255 bp, Rattus sp.
  modified_base (36): a, t, c, g, other or unknown
ttttttttttttttttttttttttttttctttatanaaacgttctttaattagtgaaacagttcattgtattatgggtaaaaataaaaccaggtcaggaagcacagcaaacgaaccaacgctgtaagctacacaaaaaacattctggtcagcctttttaaagccaggcacaagaaattcacaccattaacaatgaacgctcagagggcctttcgaaaaattcacacggcaaacaacaagttaaaaaattatcccc

SEQ ID NO: 454 - DNA, 255 bp, Rattus sp.
  modified_base (3): a, t, c, g, other or unknown
  modified_base (25): a, t, c, g, other or unknown
  modified_base (42): a, t, c, g, other or unknown
ttngacaaaattcaacaccccttcntgataaaagtcctgganagaataggaattcaaggcccatacctaaacatagtaaaagccatatacagcaaaccagttgctaacattaaactaaatggagagaaacttgaagcaatcccactaaaatcagggactagacaaggctgcccactctctccctacttattcaatatagttcttgaagttgtagccagagcaatcagacaacaaaaggaggtcaaggggatacag

SEQ ID NO: 455 - DNA, 168 bp, Rattus sp.
acaagcttttttttttttttttttttttttttttttttttttttgttttttttttttttttttttttttttttacacaagacagaactttattaatggaaggcttcttggtgaggagtgtgtgggccccagggcagggcttgttagcaccatgatgggggatggcctg

SEQ ID NO: 456 - DNA, 255 bp, Rattus sp.
aagtggctctgcttaatcaccacagaagtcctgatgaagccaaaggaaaccagaggctgacagaaatgaaaaaggaaaacagcagacacagcggacctaccctgtgtccttgccaccagctacttactcacaggtgaagcagaaattctatttaaccagcaagtttctgctttttaaagttactttcacattaccaacatcagggaaatgaagagagggtgtgttttgctttgggttatggtcacgaactaacta

SEQ ID NO: 457 - DNA, 255 bp, Rattus sp.
acaagcctgtgagagaggatgaagaaagtagtaaagattgtgttggtggcaaacgggggagagcacaaacagctccaaccaaaacttcccccagaaacgcaaagaaacacgatgagttatggcatgatggagtttgcccatcagtagcaaatcctttagaagtttacctcattcccacaccaccagaaaatatcaccttcgaagacccatccttagatgtaatactacttttaagagttttacatgccatcagtc

SEQ ID NO: 458 - DNA, 250 bp, Rattus sp.
acattcaccattggccagcccacagcaggaagtgtgttaggagctcagcggagacttctccaaaaacacaacagttttctgggctctgtgtcagttacattacatttttaagcaacacgtaatctgtaaaattgtcccaagacatccattcctctaaccgtttccataccccatcccagccccgagcctctgtgaaggccacgggctctcagtgctccccgttactgatgacagccgactcaggttcgcc

SEQ ID NO: 459 - DNA, 255 bp, Rattus sp.
acttcttcttcaagagggtcactccgaggagcataactatagaaaaacaaacgacagtaaaaactcaaggccccattggtgtcagtgaccccaacatcctcctcctgagagccacatcaagactgaaggagaaacatttgagaaagaagccttccagaaggcgaggtgggaggggtgtcacgctggcccctagataaagatgattgagcaacagggcttgagtagtagctaggtggaaaaaagagaggacaaaag

SEQ ID NO: 460 - DNA, 162 bp, Rattus sp.
cggcttaccgtggtcccggccgatgtacacatttctgatgaaattcattagcacaataaaaatttcatcttgagaaaacagccacaacaaaagtaatttataccatataaaacaatgacaggtctacaggtgcagttactcatgagtttacacatgcattca

SEQ ID NO: 461 - DNA, 255 bp, Rattus sp.
  modified_base (88): a, t, c, g, other or unknown
  modified_base (91): a, t, c, g, other or unknown
  modified_base (93): a, t, c, g, other or unknown
actgcaatgactgctatctccgattcaaatctggccggccaaccgccatgtgacgtaagcctccactcaaaagcactgttgcagatanaanangagacggtagtcactgaggcagaactataaaaaatggtgtatgttttcccctctttttaaaaaaaaaaaaaaaagaataatctttgcctcgttagatgacataggaacactgtggtgttggtaggacctgtatttttgttgtttatttataagaaggtaatt

SEQ ID NO: 462 - DNA, 255 bp, Rattus sp.
acagttttcccccttaaagattaaaaacaaaaccaaactcagtctaggcgtaagaccaaacacaatgaaaagctcactaactagattaggaacagatgatgctggtgtgaatagcttgttgttttactctagagcccttaaagaaaatccccgttagtgttttgtgttaccagccagagggtcaggggttagtgaacatgtggtaaaatgaggacttatgcaaggtttaatacgcatagcattcttctactttgt

SEQ ID NO: 463 - DNA, 236 bp, Rattus sp.
acatatgtgggactgataccgggtcagcggctgctcatgagagagccacgaggcctggtgagagctggctggaaggggctggactggaggggctggcggttcgcagcagagcgggactatctgaagaaaataattctctattatttttattaccacatgcttctttctgattctaaaatatggaaaataaaatatttacagaaaaaaaaaaaaaaaaaaaaaaaaaaaaaagcttg

SEQ ID NO: 464 - DNA, 177 bp, Rattus sp.
acgttgtatgttgggaatctttccttttatacaacagaagaacagatttatgagctcttcagcaaaagtggggacataaagaagatcatcatgggtctggacaagatgaagaaaacagcgtgtgggttctgtttcgtggaatactattcaagagcagatgcagagaacgcaatgcgg

SEQ ID NO: 465 - DNA, 255 bp, Rattus sp.
acaatagcaaaagtaggctaggtcgcctttccttggtctacgttattccctgtctaggctttgggatttgaaattctcgacaccccacgaggggaaaccccacggcttgtgtttcctcgcaattggctgtaactgcccccttggccatgctaaggttctttaaaaacagggtcattctgtgttcattcttctgccccaaccctactatgaaacaagataaccccctgtgtttctaaatgtatcaagggataccac

SEQ ID NO: 466 - DNA, 255 bp, Rattus sp.
acaaagatttcttcatctttggcactgttggacagaagtcattcactcccacttttgtaattgaattattatgaaggaagattatctggaggtatttcaactcctgtaatcctgaagggattttttttagtttattgtgttccaagtggatctctctcacacgtggtatattagcaaaagttccattttcaatatctgtgattttgttgtttccaagacccagcctctgcagttccttgtatcgtttaaaatctt

SEQ ID NO: 467 - DNA, 250 bp, Rattus sp.
actattgtttgaggttagggggtggaatcggattattaggaagatccctgccacaactattgtgcttgagtgtagtagggcagagacgggagttgggccttctatagctgatgggagtcatggatgaagtccgaattgggcggattttcctgtggctgcaattagtagtcctgtgagagggactagattgttggtgttggttaagaaaatttgttggagttctcaggagtttatgtttaggcagaatcag

SEQ ID NO: 468 - DNA, 255 bp, Rattus sp.
  modified_base (143): a, t, c, g, other or unknown
acagtttggagcccaggcttcgagggggcaaaggaggtttcgggtctatgcttcgagcacttggtgcacagattgagaagacaaccaatcgagaagcttgccgggatctcagtgggaggagattacgagatgtcaatcatganaaagcgatggccgagtgggtaaaacagcaagctgagcgagaggctgaaaaggagcaaaggcgcctggagagactgcagcgaaagcttgcagagcctgcacactgctttgcca

SEQ ID NO: 469 - DNA, 223 bp, Rattus sp.
  modified_base (83): a, t, c, g, other or unknown
  modified_base (152): a, t, c, g, other or unknown
  modified_base (197): a, t, c, g, other or unknown
actagagatgagtcccagagaatgataggtcgaggccggccatcttggatgaactctaatttcctgctcacagatggcagggncctgttgagacccaggatcctgtccaggtggaaggcaaacacttcactcatgtccagaggttgcttganaagcccacaggggctagggccgcagccaggcacagagcctgaggngcttccttccaacatcagcaagcggg

SEQ ID NO: 470 - DNA, 255 bp, Rattus sp.
acacttggcaagagggctggatcactggcctgggtaggtgggtcccgtgcctcctggggagacagattgcacaggcgggttctctgcatgtctctggcttcttcctgagttctcacagttttttctctaactgccctgctcattactggctgcctcagcacgaggtctgtatcatgttgttctcacgttaccctgacagcatacaggacggggagtagggcacattcacagtgttcacagtcagcagacatggtg

SEQ ID NO: 471 - DNA, 250 bp, Rattus sp.
acctgcggctgggcttggagaagtcaccctactgccacctcttagacaacagccactgggcagagatctgtgagacctttactcggggtgcatgctccctcctggggctttcagtggagtccccactcagtgtcagctttgcttctggctgtgtggcactgccagtgctgatgaacattaaagctgtgatcgaacagaggcagtgcactggagtgtggagtcacaaggatgagttgccgattgagattga

SEQ ID NO: 472 - DNA, 255 bp, Rattus sp.
actagtttctgctagacgcccacactacggcatgtttctttggttcagattgcctagcttgatgctagttcaggaaggattacgtctccatttgtgttagtatgctgtgctcagctccatggatagggaccacgtggcagccatctggattgtcaatagctggggataaaaatcccaaggaggacataagcagaaaaaggagcaatacttcctggttggaaccaaactcaaaccagagatcttaatgcaccagac

SEQ ID NO: 473 - DNA, 250 bp, Rattus sp.
actcactggaacatttaccctgtgcttggtggtgtattcttaaagccaatccctgggaaataggtggtataatgagtagtatcatcttactacttgcccaagtttgcacacctactaaataagtcaatggaattcaagcctaattctgtctggcttttctactggattgctcttcctcattacatgaaactacaataaacagtttatagttatactagccttttataatgaattcagagtttgatacgtt

SEQ ID NO: 474 - DNA, 255 bp, Rattus sp.
accaaagcccagtgggatagagatgggtcaggagacctgggccctgaaggtcacacttttcagaactactaagtgtgcccaaagggcaaaaaactcaagagggagggcattctgagctgtgtgagttttcaaactcacaagataaaacgcaaactcccaagaagcatgtgattcaaaaagttaccaccttcttttggtttctgaccctgtcttaggctgcaggttgccagaccaggctggttgacttctgagata

SEQ ID NO: 475 - DNA, 255 bp, Rattus sp.
acatttggtgattatgatattgcaatgtagcagatccaacattattctcaaatcaagatgttaaattatgttttgttttgtcttccattaaatgcaggtgaatgtgttcagatgtaaaatatgttttgctgaatgtggacagtttatacacataacacatattctctctgaaatgactctgtatataaggcaggtgtggttgtgcatgcctgtaattccagcagttgggagatagaggtcaggatcattcaaggc

SEQ ID NO: 476 - DNA, 255 bp, Rattus sp.
acctttcctaagaactttgacttaaggtccctaatgggtgagaagaaccaacacagaaccaaactgactcgcacgtccctagcaggggttccggttcttgtcgcatgtgggtgggaaacactactaactctgaccttccatacctcatggggagcacagggtccctgctgggtctccccactggacacagtgccaaggacagccccacacatcgggtattgggtcccctgtgtttttcccgtctttccaaagtct

SEQ ID NO: 477 - DNA, 255 bp, Rattus sp.
acaggttactgcttagatactacagggaagagtgcagagactgctccagccctggaccagacaccaagctctatccattcatataccatgctgccgagtccagtgcagagacctccgaccagccaggacagaggacgggcacctgaggacccaagatgagacttcctcgcagagagacatcccgtttgagatgtgggatgaactgacttaatctgatctaaatctgtatataatccacatttgtaatcaaggatg

SEQ ID NO: 478 - DNA, 255 bp, Rattus sp.
  modified_base (40): a, t, c, g, other or unknown
  modified_base (103): a, t, c, g, other or unknown
acaaattgcttctgaggcattatttgccctaaaatatagngggcttttgttttgagactgggtttcactctatagcccaggctggccttgaacttgccgctgngtccttgcctcagtttctcagcttcaggattatggacagaaatcaccatgcctggcatgtaactatttttgaggctgaaatagctaatgaaaagccctatctagatccagattttatatgacatcaaattagggaagtggagggaattattt

SEQ ID NO: 479 - DNA, 255 bp, Rattus sp.
acactttctcattgacaactcccacggtgggaagacagtttattacttagtcttactttttttggacagctcattcctgcacaagtgagagacatttgaagagtaagtctgtttgcgatctgtcatatttgaacccttctacaaaggagagctccctaaattgaacttcccgaaatctaactttcctcaatttccttcctaagacttaaaaacatcagtaattgagggcatctcctgattaaaagtcccctagaa

SEQ ID NO: 480 - DNA, 251 bp, Rattus sp.
ggaaaagcttgctctaccaggctgccccgggaagccgacttgtctctgacttggttgaggtcggggttctgactttctgcaccctcgtgttaggtgatttgtgttaatgtatgaaaccgcagagcacgttgggccacctgtggcatcaagactgcaacttgacaatcacggtttgctgatctcaaacgggcgctgaaaactcagtctgggtgtgtgacttaacgattgagcccgcccttctgtttgtcagt

SEQ ID NO: 481 - DNA, 255 bp, Rattus sp.
acaagctttttttttttttttttttttttttttttttagcaaatatcttcaatattttattttataggaactaaatggggatacaatataaaagcattcatcacacttattttccaacttgaaaagaatcaaggactgatatatattcctcaggcacataagaaatgacttattaaaaagtgaaaaccaggtgcttgctcacagtctagcactgccaggagggatagcacacacctgtaaccctagctctgggga

SEQ ID NO: 482 - DNA, 255 bp, Rattus sp.
acacatctttaatcccagcacttaacagatagatggatctctaagttctgaggctagcctggtctacagactgcgttctagaatagccagggctacacagggaaagaaaccctgtctcaaaacacccctcccacttccctagtttttcttgtttttggttgtcttaacaaaggggtgtaaatgctactaatcattcaacacaggccagacccaaagacaagccaggccagcagtggtagtgccaaaggttttctc

SEQ ID NO: 483 - DNA, 255 bp, Rattus sp.
gtcggggcgcttctgttgcttcccatcttcgagggtttcatttcgaacccttccctgcgtggaggagggcctgctgacggccgattcctttgcagcagaagaaactcttaaattctggaaatagcgactcagtatcatggccagccgcattaatgaagatccagaaggaagtcgaatcacttatgtgaaaggagatcttttcgcatgccccaaaacagactccctagcccattgtatcagtgaggattgtcgaat

SEQ ID NO: 484 - DNA, 255 bp, Rattus sp.
acatgatgctactgcttttggctgtgtgctctgccaagcctttctttagcccttcacacacagcactgaagactatgatgttgaaggatatggaagacacagatgatgaggacaacgatgatgatgatgataattctctctttccaaccaaagagccagtgaaccccttttttcctttcgatttgtttccgacatgcccatttgggtgccaatgttactctcgagtcgtccactgttctgatctaggtttgacat

SEQ ID NO: 485 - DNA, 255 bp, Rattus sp.
cagattattctcatggagaccagacatgcattcttctgagttacgttgccaaccttctgatacctatctgtattcacaagatatctgtcagacatttcattcatatcaccatgtgtcgatgtaacaatcctctgtttttcagcatgggtgacttccaagtccaaggcctagatccagttttaactacctacagtaaccctccactgcaggcagacgggatttcagttacttagcagaaccctaactgttcactgt

SEQ ID NO: 486 - DNA, 255 bp, Rattus sp.
actcgccggccactggaaactgccaacagtgaacctcagcgtctcaagaaaacactgaagaattctatgaattgtagcagtgaattggattgtattctctggcatattttgaagaaaattgggctattgaaacatttttccctcctgactgctgcttgaatgttcttggaagctgtttcgtatgtatagggtttttaaaatgtgattcctttgtttgaatattaatggctttttccattaaagaataaaatgata

SEQ ID NO: 487 - DNA, 250 bp, Rattus sp.
actgaggcgggccagggagatgtcagcattggtatcaagtgtacccctggagtagtgggccccactgaggctgatattgactttgatatcatccgtaatgacaatgacaccttcactgtgaaatacacaccctgtggggctggcagctataccatcatggttctttttgctgaccaggccacacccaccagccccatcagagtcaaagtggagccttctcatgatgccagtaaagtgaaggctgaaggtc

SEQ ID NO: 488 - DNA, 255 bp, Rattus sp.
accctgaagaacaagttctactcttgccaaagaaatgcctggcctggagagctctcctgaaagccaggatgccgtcgtgagccatggaccgctgtgcacgcctctgcatgagaaaaagccatattggaaggtggccatatgccccgtggattctgtgtaggtcatgtgattcggtttctgtctccagctccatctgatttcgctctgtcctgttcttctgttggtccctcccaagttgtaatttgtattgaaacc

SEQ ID NO: 489 - DNA, 255 bp, Rattus sp.
caaaaaaccatgcaataaatatactcaaactctgagctcccaatgcgatgctgacttccttatcacattacaagtcatttgtgattttaaaaagttagctgccataaattttggaaaatgccagtgtttaaaaagttaactgtgctaaaaataaaagttcagcagaacagaaattgagggtttcaaactattcaatgttacaaacaaaagtgtgaaataccattctttggtctagataagctgttctctttacat

SEQ ID NO: 490 - DNA, 255 bp, Rattus sp.
  modified_base (178): a, t, c, g, other or unknown
  modified_base (202): a, t, c, g, other or unknown
  modified_base (208): a, t, c, g, other or unknown
tgacgacctcttctaaggggtgaggggatttcaggaatggttttactgagccacgttacttttaaagttcttccttaaccactctgaatttaattggaggaagacttttttttaaataagaatatgcaagtgagcagggcccctgtggccttcacctttgttctcaacatactgtcantagtggccgtctcgtgggcattgncgtctnctctgattgtctgttttatgtctgttttctttggtctctgaaacctg

SEQ ID NO: 491 - DNA, 255 bp, Rattus sp.
accagctacaacccaggatggaggttgggccagtcttatcgtcacgatttggtcactattatgatgtatcaagaaggattcctcaggagctactagagagttcgaattggcatggattcttccttccagaacacacccctccaggtcttaaaggagaaccctgctttttgtcctgtggctacatgaagctgcttcagttctttcagaacatcatttatactgaaggatttgatggagctaatccccagaaaaaac

SEQ ID NO: 492 - DNA, 255 bp, Rattus sp.
actgcatcagtttcctatgctggcatttcttgttcagtaacttaaggactatcttgtctctcagttcagagactaattatccaggttagattgaccggtttcactgcttcttagcaacctcatagaaggatttgggaaagaaatgtaaaacagtgcacctgctgtgtgcctaaccttgaggagtcccggctaagtgctacccgagctgggaaggagcttgccactgaatcacagaagcctctttagtattcaggt

SEQ ID NO: 493 - DNA, 255 bp, Rattus sp.
acatgttgacagcaacttgattggatactctaacgaagagatcaacaaaaaatccaccttttctttctgaaatttcctctagtaactccataagtttagcagccaagccaagacggcggaattcaggggcgacagacagagctgtgacatgtccatgccactcttccctagctactgagccttctgctttgcccataatataacccattagctctccgccaggtgcctcggcaacgatgaaatactccggccagt

SEQ ID NO: 494 - DNA, 255 bp, Rattus sp.
  modified_base (165): a, t, c, g, other or unknown
  modified_base (173): a, t, c, g, other or unknown
acttcattgctctattcaattaagctctctattcttaatttactactaaatcctcctttgtcctttagtttcataaagggtttcgtaatgttctctgggaaaagaaaatgtagcccatttctttccgcttcattggctacaccttgacctaacgtttttatgttngttcttgngcttactttagtgcctttttagggtttgctgaagatggcggtatataggctgaattagcgagaaggggtaaggtagaacggg

SEQ ID NO: 495 - DNA, 255 bp, Rattus sp.
acatcttctagttttaataagtccacgtatgatctaagggtggtcttcctcatacagtatgtatgaaaatcaaactggtcatcggtgatttctataaaatgtctctcaatttcgtggcatttcttaagtgcttcaccaaatttgttcattgctttgtatgcctgggcacattctgtctggaaccacatacactgcatctcattcaggttctctaccgctgatgttccttcccttgtaaacttggaacacatttct

SEQ ID NO: 496 - DNA, 250 bp, Rattus sp.
actcattctttcactcaatataggaaagctggctacacaaagcatcgagagattaaaatcttgctgaaacatgcgaactggaagagctcagttacttcaactttgatttccaaacctaacacctgactgaagtaggtcacatcctttcaacacattactttatagacaaatggctattatttggaggcaacccaagataggtaaaactgctactgtcttggaggctcatttatttctctgacccagcagg

SEQ ID NO: 497 - DNA, 255 bp, Rattus sp.
acaccgagattcctatcagtgctttcttcagcctctattacttcacggtttagggacatcagttatcatttcctgcatcaggaccaaactcaaactgtcatcactgaatggccgtaataaggaagttaaaacttttcagtctgtgtgtatagcagttgtgctatttttaaagcactccttgaccatcactgccactgttccctgtgagggagcgcaagactctgtttctttagggttgttactttagaggatgtg

SEQ ID NO: 498 - DNA, 255 bp, Rattus sp.
acaactcattttgcgccaattttcacaagtgtttgtcttagtctaaatgagaagtgcaaaggtttttatactctgggatgcaaccgacatgttcaaatgcttgaaatcccacaaatgttagaccaattttaagtttcttaagttatttcctttaaagtatatattaaactgaaacctaagtagactgcattgactaaccagtcactctggatggtggtggaactgaagcatgcttttacttctaagactgtctaa

SEQ ID NO: 499 - DNA, 250 bp, Rattus sp.
acaaagttagtgggatgcctattttttatgtaaggcgggtatcacccaaccggaagaagtcttctctccctcgagttctgttgccttatgtataaaactgcacccagcttgcttagagaagttgccttcatcagagaagactccattaattcagtgtcccaatggcgtcctagggaggcagcaggcattttgttttccccagtaagagctgaatcctttaaaaacttaagaaactacttttggcttcctg

SEQ ID NO: 500 - DNA, 255 bp, Rattus sp.
acttactggaccatgagcagactttccaggtctcgtgcttgctaagctgccattactggccggtgttagggccaggcttcattacagtgtgatgtgctgtgcagcacaactaaatggacatggagttctgcagcagaaaagccgcattgtgtctttgaacttgctggattcaaacactgcactttgtaaacaaatgaccagttttttacttgtgggtgtgttttttaagtaggtatatatgtaaattgggtttga

SEQ ID NO: 501 - DNA, 255 bp, Rattus sp.
acatatttacagacattgtgtaaactgttcggttgacttaaccaacatcagctgatgaaaacgagcgtgcatctaagtgatgcttttatcaaaatagtgttttggtttgtgttttgccgtaagagctccaggccctgcttccttgtatgaaaggctccccagtttaaaaagagttctgagtgcacacagctaatgggatgggtctgttaggcatttccatctgatactggatatggcttcattcttgtaagagac

SEQ ID NO: 502 - DNA, 149 bp, Rattus sp.
accattagtgttagtagtgtccctgcttcttgatcctacatctcagattctggaacaggaaatcttcactaagcctgctgtggcctgagggaagcacctcaaggaagaggcatccactctgaagttttagtgagtccacatggggtttg

SEQ ID NO: 503 - DNA, 255 bp, Rattus sp.
accctatattttgcccatagtgccattagtagattagagattaaagtcacttttaactttacaaagttaacttgtatatgttctgttctcggtcgttagttctctcaaaatcaaatgaattcagagggaacttgtctggctgcttttgtttcaactgcaggcagtggagcagaaggacgccgcgtggcactaaagtgaactgttgcgtgttaacagttttatacagagactgagccattttggatgactcaaaat

SEQ ID NO: 504 - DNA, 255 bp, Rattus sp.
actctcacgatgatcatgttttcaaacctggccccagctgtgtatggttcagtgaggtttagcagtcacttgaaaaatgccctgggctcattccaggccagacactataggcttctttacaatctggagttttctaaagcatgggcaaatggggcttttgtcaaaacaacactcctttgaaggaagtgacatcagacaagagctcactatctggtgccagtctgcgggcaccatccccaaacaagagtgcttttg

SEQ ID NO: 505 - DNA, 250 bp, Rattus sp.
actaggactggtaagggagttctgtgcatacaaaattattactttcgttgagagcaggtttgcaccaggacttcctagtatggcctctgtcttctgggcaacgattattttcctctgggaaaggaacctgcggctccctcacagtgatgcaggaaagctaaatgctgcaccctcctctcaaatccatataacaagccacagacctcagccctctctacagccccacacgggtggtgtcagcagcaagctg

SEQ ID NO: 506 - DNA, 255 bp, Rattus sp.
actgtaacgtagttaaattctctcactaagaaggtcacacacccacggggaaaccatattggtgttgttttgttgggtggttgtgttgtcaaactgccttctaaatatgtctgataatatcatagattgtgctgcttccaatcttgtccaggaaacctagggcactcatacggtagtgtgtgtcacccaatgcagtcatgttactgctcaaagtgctgagaatgagtaaccgtgagtggtcaatggtggctggga

SEQ ID NO: 507 - DNA, 255 bp, Rattus sp.
  modified_base (244)..(245): a, t, c, g, other or unknown
accagtcatgtatatgttattatatgattagccacaggtttttgaaaatatataattaccttatatccttaagtccttaaaagattctgcacacattctaattctactgttctagaccagcattctaggatgtgtgtaacaaccccttataggccctaggagccttttaggctataatagttttaaatattcacacccttgactagcagtgggttgtggtgtattttgcttttctttttaaggnntttttagatt

SEQ ID NO: 508 - DNA, 255 bp, Rattus sp.
acaaaataaagctggctactaaagccataccatggttaacgcagaaggaacaaggctgtcatggagtccgtgaagggaagccagatcaaatgacacagtccaggggcagagagcacaaacccgtccttctcagacacacttttgaatgtgttagagaaagtctgggtggactttataaggccgtcataactgttaccgcgcaggctgcttgggaaaactgatgccggttttgagtcccaccgtgaagcgatgcgg

SEQ ID NO: 509 - DNA, 250 bp, Rattus sp.
acctcggtgacgcgtggctgaatgtcacatcagtcacatgcgtgctatggctctcattcactgaaaccatgacaaggatctcagagtgcgctttaaataagggaccgcatgaagaagcagaggcaacaggaggcgtgatgtggatctagactgatggcaagaaatctttattttccattaaggaaataagtgggaaatcatttttaagaaggaaggtcaacagaaatagaagtgtgctatttagaacatg

SEQ ID NO: 510 - DNA, 250 bp, Rattus sp.
acaggtgtattttacaatttttgtttaattaaaaatgttaatatattaataatcaacctggtcaaaacctttcaggtttcttcgtttgagtcagtcgccttgattcagaatgtcacgagccttatgatatcatgctgaggcgccttgcaaatccgacaattaacgatcctcctagaccttgaggtgatcagcataagaggccagatcccctcgagtcatctacacctagcttcaccttattctttaaagg

SEQ ID NO: 511 - DNA, 250 bp, Rattus sp.
acagccttgccgaagctgcttttaaaacaaaaggcaaggaagtcttccttttttagtttttttaaacaaacaaaaagtaatgactctttctcatctgttacaagatttcaaatcttttatcagcattttccctcataaagggctttacttcttctgaaaacatttataaaaaccaggtcaacgagaccaaatgtatgacaggtgacttcagagcgacctttcttgcttcgtaactgcgaagaacgggctt

SEQ ID NO: 512 - DNA, 250 bp, Rattus sp.
acatgctttcccatggagtctcactaaggcacagaacgctatgctgaataaagacggtataggacaaaactgaactatctttctgagagcaaaacctatatcagcaaagtcaagaactgtcctaaaaataggggcatcacgtttgtaaatgttttacagtctgaactccatgtcacgtaaataagcaagctaagtgaacaccgggtccactgaggaaggtcctttattcccaagcatgtccattgagcgt

SEQ ID NO: 513 - DNA, 255 bp, Rattus sp.
acctctctttgactaagatgactaagatggcccttggtctagtggggaacagtgggcatctgccctcacagatgacacctcacaacaacacctcagattcccgtgttccaaaggcagcaacaattttgctatttctgttaactttcacaaaggcacccccaaatacccacaacagaagttaccccggttttgtctacagtgactgcctgtgggccacgccatctaaactgagagggggaaagattctatgttcaa

SEQ ID NO: 514 - DNA, 255 bp, Rattus sp.
actcctcagtagccatagcagttgtatacccaaatacaaccaacatcccacccaaataaattaaaaatactattaaacctaaaaacgaacccccaaaccctaaaactattaagcacccaatacatccactaacaatcaatccaaacccaccataaataggtgaaggcttcaacgccaaccctagacaaccagtcaaaaacagtaaacttaaaataaacatataatttgtcattatttctacacagcatttaactg

SEQ ID NO: 515 - DNA, 255 bp, Rattus sp.
actatgacgagatcatcaatgctttggaagaagaccctgcagcccaaaagatgcagttggccttccgcctgcaacagattgccgctgcgctcgaaaataaggttacagacctctgaccatcagtgctgcctcaggattcagtagaggatgcacccaaggcttctggagagcgtgtggtgaacccacctcttgtagactatagcgtctttctcctgagcaatactgcccgggcgcccgagtcagcaccagctccgt

SEQ ID NO: 516 - DNA, 250 bp, Rattus sp.
acagtggagaatggttttccttgctaacaatatttgaactgctgtatttctccttgagcagtgcaagaattttcttcagagcagacaagactgcggctgaagagaaccaagaaaagaaagagaaggaagaagaaactaaaatgagcaatggagacggatccgagagcactgtgtctgcggatcctgtcgtgaagtgatgggatgcggtcgtcagacatgtcgtgctttccagagactgacatggatgcta

SEQ ID NO: 517 - DNA, 255 bp, Rattus sp.
  modified_base (26): a, t, c, g, other or unknown
gtgagctctgctgggtaaaggactangcggctcggggagctccgctagttggtgtttgacgctctgtatcataatcctcacttctgccctctgtgtattctaggttggggcttgtcccgcacctaaggcaagaggatggtggctgcaaagaaaacgaaaaagtctctggagtcaatcaactctcggctccaacttgttatgaaaagtggaaagtactatgtcatctattcattttttaaaacattcattaagatt

SEQ ID NO: 518 - DNA, 255 bp, Rattus sp.
acaatacccaattgataacagcttgaaagaagtgcaatattgaagttcaaatatttttaaaagtgctgactattttgactagaaatggaaatgagtccgactcatttgtaaaaataatgtaggcggtgctttagctagtcctgtaagaacaaccaatcaaggttgaagaaaagagcataacacattagaaatacccaaattatgcttctctgaaattaaaaaaaaatggattaaagaactgagtattgctttaat

SEQ ID NO: 519 - DNA, 250 bp, Rattus sp.
accaggtgcacaccgattgcaggttcttccgaccacgttagggcggcactggcactggcctccattggggtcacacacagaactcagagatccctgagggtcacattcacaagcgaggcctgcctggtggatcaaggcagaaatgctgaagatgatgtttctgcagacatctgtcataggtgttttcaccacactccggctgttctccagacacctgtagcgctggaaggtttcccaggcactgttggtg

SEQ ID NO: 520 - DNA, 251 bp, Rattus sp.
acacagaaggttgtgaaggggggaggggtaacgtggagctggggcgcttcctgacagaagtggcagcaaccagcgtgacctgtaagagatccatgggtcccccaaaatgccccaggctccccaaagataatatattcactctaaacttggccatctaagccaattcttctcagtgaccttgaccttctaactcatcttgccacccatatcttcagagtgatcaaccaccataaaggtggccctagattggg

SEQ ID NO: 521 - DNA, 250 bp, Rattus sp.
acatacttaactgttagggcaggactcccaggtttactgtttttacagagatcttagtatttcatcatgtaaataatttacctctccctgaccttctatgctttaccattgcatgataatatcatttcaggttatttaagagttaaatccctcaatgccagtaattataagtatacactgaacatggcgttcagcatatgctacaaaatggcactgtgtcctttgctaaaaggcttcaagaataatacac

SEQ ID NO: 522 - DNA, 255 bp, Rattus sp.
  modified_base (229): a, t, c, g, other or unknown
acattaacacttgggatctcactttgatgatctactaggtttgttatcagccccctgaaggcaaatcaagcttgcatgcgtccacatacagcaccacaaccatactctcttacacagtcactccaggactaggagtctgcttcatgcgtgaagagccctagatttgaaagatgaacctggctctttctctaccacgggagccagacattcattcaacactgttcattcntacactgcttcacagcgaggcctggg

SEQ ID NO: 523 - DNA, 251 bp, Rattus sp.
ctttttttttttttttttttttttttttttttttttttttttttttgattttcaatgataaacttttattctgaatatactgtttttgcccaagatttaacacaacattttctgggattataaatattttttataacagtattatacaaatttttacaaaatgggttcatccgactagttaatttccacaaaagtgtccagagaacataataagggggagaaaaaaaatctgttgttcacaaaagccactt

SEQ ID NO: 524 - DNA, 250 bp, Rattus sp.
  modified_base (88): a, t, c, g, other or unknown
  modified_base (131): a, t, c, g, other or unknown
  modified_base (135): a, t, c, g, other or unknown
acaggcacatagcactagccaaagattataccttgattacattcccaaaaggcagatatgctgcaaacatgcagagatttcattcagnttggcacatggaactaaattttgatcctagtatatgtggattncaanttgctgtgcatatttttgtccaattttactgaggggagggcatatacatttgttgggctgtatctatccaattctgcctgtgacaaacacccaaacatcctaaaatatcattata

SEQ ID NO: 525 - DNA, 250 bp, Rattus sp.
acccatcacaatctctttagttcttccatacattattaggaaaagctcacctgtttccatctaattctgtctctgtattctgtctccatataagctttttaggacttgctagctaaccaggctgaggagtgggtaagagaggagacaaggcagagttctgtgacctcttttacagagcatcctctcaggaaatgctgagtataaatgaactacaactcctgatcttacaggtgtttttgaactacttttc

SEQ ID NO: 526 - DNA, 250 bp, Rattus sp.
  modified_base (225): a, t, c, g, other or unknown
accaggccctgtgcagtttatcagacattcgacatgtctgttttttaatgcttgtggactgcagtccacctcattctaaatttttgaacatgtaaaggaaaatacactccccccacctttttgatacttttcttactctagtggtttttttttaatttttttaattttttttcaattgccagcaaggtgataaaactagccaaattgtcttccttttcaaagcanaatcatatacgtgtgtgcctgctgc

SEQ ID NO: 527 - DNA, 255 bp, Rattus sp.
acgcaaacaccagtaggtattgttgttaaaactcgtgcatgcacagaaagatcccaagttccagaacggggcggtctgccagtggttgttgtcgtgggtgaaacaagtgaagctaggcaggctgcactcttctccttttctctgacgtttcttctccttcctctccttcttcctccgacgatgctccttgaacagctgcagtttgctgtccacctcctgggccgcagcctccttgaaggggtgaaagtggctctt

SEQ ID NO: 528 - DNA, 255 bp, Rattus sp.
acagcaccaggtctgtggcattgggtcacagtccagctggacaccgtgggcacacctcggatttctggacttagtctaggacagacactgtgtttagcctgtcatttggtttaaaggttggttttgttgtaacagtgcttatcataccacatgtcagcagctcttagcattactgagggcaaggagggaaggactaacagcacaccagcttggtaagatcataaatatagaagcttaaattatcactgttgccag

SEQ ID NO: 529 - DNA, 250 bp, Rattus sp.
actcacaaagccctgggctcaattcttagggaggcaggggaattcccaaaggaattcaattcaatattaaaaactaaagcactctacagacattaggacacttcagaaaatggacattttaaaagtgtccacgcacacccgttatgtgacaacctcctataatctgcctttagtcccacactcaaactttagcatcagtcttttatgacgacaatctaccgtggcccctaaaacattgccttaaggttag

SEQ ID NO: 530 - DNA, 255 bp, Rattus sp.
acgttttcaggctcgagtccacggagaagcacactggtcgttcctaacgtgactgcagccagccactgcagcaggagcaggtccctttacttccggctgcttagagagtcactcagcaagatagttcagatcgtatatctgtctttgtttgtttttcaaaatcattaaatctaaatagctcacttctgagcaaaaccctgctctgtggacaattatcactgccagaatcctccatttctgtagtgtcctgtgtga

SEQ ID NO: 531 - DNA, 255 bp, Rattus sp.
actgggagatgaagctgaggaagaagaaccaaagcctatagaactgcctgttaaagaggaagaacctcctgaaaaagttgttgatatggcatcagaaaagaaggtggtaaaaattacatctggaatacctcaaactgagagaatgcagaagagggctgaacgtttcaatgtgcctgtaagcttggagagtaagaaggctgctcgggcagcgaggtttggaatttcttcagttccaacaaaaggtttatcatctga

SEQ ID NO: 532 - DNA, 250 bp, Rattus sp.
accagttaaggaattcaatttccgagctaagtgtatctacacggcagtgatggtgcgaagggtgatcctggcccaaggagataacaaggtcgatgacagagactattacggcaacaagcgactggagctggcaggccagctcttgtctcttctttttgaagatttgtttaaaaagtttaattcagaaatgaagaagattgcagaccaagtgattcctaaacaaagagcagcccagtttgacgtcgtgaaa

SEQ ID NO: 533 - DNA, 255 bp, Rattus sp.
acacaatttaatatttattatatgcattttatatacattatttttcaacagctgtgtgtttgctctgtggtacaatcttaaaaatttgctgattcatagtctgtaaaacaaaaaccttacaaaactcatcaaaactcgcaaactgatcagaaaaggcttttggaagactagaaaaaatactttattgtcttaatcatgcattacacaaagaaaatcttcagttacaccataaaagtaagcacatctaaaaaaata

SEQ ID NO: 534 - DNA, 250 bp, Rattus sp.
acagagtctcctttaacaatgctgcccccaaggaagatctgcccagtgaggcgaggcttcttcgggttagagatgtcatactgccgaatgtccccgtgcagccagttgctgaagtagaggaagcggtcatccagggacagcaagatgtcggtgatcaaaccaggcatttctggcaacatccagcccttcactttcttggagggcacctggatcaccttctccactgaccaggtgcctccctcattcttgt

SEQ ID NO: 535 - DNA, 255 bp, Rattus sp.
acttcttgaaactgacttcataacaggagtcattgtaagttccacagaaagcaagacgtatgtatttcagttcttgtcttgaccagcagcactccggaggcccagtgtccggtgccctccttgtatctgaagcaggggtaacagctctgctgtgggcctgtttccctctagtatttacctcaaggcttggaaatgtattttgaaagaccttcagtcaaacgaagtaaagcaaatgtcaagaaggataaaccactg

SEQ ID NO: 536 - DNA, 255 bp, Rattus sp.
acgtgcatttaggcaaatagtttgtagcccagggtcctggtgctaaattcttacatgcctcactagaagtatggagcagaaaagcaggcgttcctgtgctttccccatctctttagatgtgcgtggccttgcctgactgcctttgcttgtgtgacatcacttagccagagtccccactgctggctttgctcacttctctttagacaatattccagtaagcttgatctcataattatgtagtaattcatctagaga

SEQ ID NO: 537 - DNA, 255 bp, Rattus sp.
acaatcttacctttcgctgaagagaatgactgctcaggttgtaaacaaggagctagccttctgagcctctgttgattagccccaagtaatccaagctgaagtaatgtgggcttctgtttaatgataatcgttaattatctatgatatatgtttctttttcccgtctgacttcctactcagtcattataaacacagacttgaaatcatactttaaaattccaaatgcctaaagatgtgctaaactggaggtaactc

SEQ ID NO: 538 - DNA, 255 bp, Rattus sp.
actactgacatcatgaacaatgtgaactcattagaaaacataactcaatgagttagatctacaaacaagaaagaacatgaagtttttcttgttcatgagagaaaacctgtcagtcagcaagaagtaaatgggaactgcctgaatgttctttcataaacctaggaaataaagccaggctcatcagtgagaacttggagaatttacccacacaacctgagctgttaagaaaacattggactttcatttcagtcgcac

SEQ ID NO: 539 - DNA, 255 bp, Rattus sp.
acaacagttgttggtcttgacgatattatggatgaaggagttgttaaagaaagtggtaatgataccattgatgaagaagaattgattttacctaacaggagtttgagggacagagtagaggacaattcagtaagatcaccaagaaaatcacctcgtttaatggcacaagaacaagtaagaagtttgcgacaaagcactattgccaagcgttcaaatgcagcacctctaagcacaaaaaagccatctgggaagact

SEQ ID NO: 540 - DNA, 255 bp, Rattus sp.
accacagtttttaactgaaggaaccagttggaacaatctcaatttaactaaaacttgaagaactaaaataacaatgcaaagctttagcattgttttggccaaacttgttaaaactgtaatgcaagaaccaaatgcactgtgatgtggcaccaactaattagcaagcatgactttttcacctgagagtgaaaaaaggaaactctaccatggcttgaagttaaagagcagaactcctgactaccattctgatcaaga

SEQ ID NO: 541 - DNA, 255 bp, Rattus sp.
acattactgaaggactatgaattcttacagtgacgcttcacaccagtgccatgcgcacacagggtgattcagaaggacagatggaacggtgacaatgtgcagaaaagcaatcaagggttatgggcctgtgggctcttctgagatggtttcatgtcagctcctaagcgctcattctacacagtaagctaatgctggagcgcaactcccaagatagagcacgctgtctcataaataatgaagtctttttctcaggca

SEQ ID NO: 542 - DNA, 255 bp, Rattus sp.
acaacttggaactcacatatgaaaattttaagtcagaagaaattttgagagctgtgcttcctgagggtcaagatgtgacctctggattcagcagagttggacatattgcacacctgaatctccgagatcatcagctgccgttcaagcatttaattggccaagttatggttgacaaaaacccaggaatcacctcagcagtaaataaaaccagcaacattgacaatacttatcgaaatttccaaatggaagtgctgt

SEQ ID NO: 543 - DNA, 250 bp, Rattus sp.
accaaagagcaaaattttacttcctctggaaatgattgcctacatgtggctcccctttccttaggctaagtgagaaatacagtgaagtagctgcctggacagaaagtaagtttctgctttacagagaacaccggtgagtcatagagtcaggggaaggtcactgggagcacttggctgtgcacaggttctggagcatctgtcttaaatgcctttgagacacagtaaatgttaaggaagacaaagttgagag

SEQ ID NO: 544 - DNA, 238 bp, Rattus sp.
accaaatttgaatcattgcaaatacatttagcttctgaaactccttgcccaaatgctgccttcgctagaacatcgtaaagttccttcagccatcatcagattccaattcctgggaagcctcttcagatgagctgctccggtggatccgcccatcactcttcatactgtggaaagtcttcttgaatgcctccatcatggcgtgcgccagcttcttggcctccagcttgctctcacattg

SEQ ID NO: 545 - DNA, 255 bp, Rattus sp.
acataagtgtgtatttccatatgcatacagtatcacagtaaggttaaaggtataaaccaggcatggtaagaaatcagtaagagtgtaattacaacatacggcatactgcaagtcatttaaaaaacaaattacttctagaatttttccttagtatttttagatcacagttgattgtgggcagcaaagattacagaaagcaaagccacaggtaaggggaatccactatgttcaaatccccattcagtggacattctt

SEQ ID NO: 546 - DNA, 250 bp, Rattus sp.
acatagtcagcagatgaaacccctcttctccagctcctacccgagagctggctctaggcctgtgttatatgttctatttagctttttatatatgacccttgatctgtgtatttgaacaccgtgtgtgtccacttacctttgtgcagacgtgcacattgcgtatgtgtatatgcctgtctcatctagcttatcaagagttcggcaggagagggaagcctgcggccgagaatgactctttgtggatagtgta

SEQ ID NO: 547 - DNA, 255 bp, Rattus sp.
acttgttataggttactaatctccaatgagtatcaccacaggaataaccaaaatcaaataatggaacagaagactgacaaagtgtttcacatcctggaattagataccaagtcagaagtgggggttggaagtgttgcaaaggagactgtaggactaagtatattcttgtaataaaaccagcaatatcaacagagttatcatctcacttctaatttcttcccctcaagaacaatttgaatctctttggcatccaaa

SEQ ID NO: 548 - DNA, 255 bp, Rattus sp.
actcgaggcacagaaagctgtatgcaaaaaagcaccagagtcagacttccctcaaagttgaaactctggagcaagacaacgggtggaaaagcatgtcccaggaacacttaaacggaaacgtgctttcccaactggaaaaggtgttctaccaccttccggcgggccggaaggagatcgcggaagcggaagtgcggatgatagactttgctcacgtgttccctagcaacacagtagatgaggggtatgtttacggtc

SEQ ID NO: 549 - DNA, 149 bp, Rattus sp.
acctggcctagtgcacttagctttttttgtttctttgttttgttttgtgaaacagggttccctgtcctggaactcgctctatagatcaggctggtttcaaactaagagagatctgcctcccaaatgctggggttaaaggagtgtgctag

SEQ ID NO: 550 - DNA, 255 bp, Rattus sp.
acccttggggtgtggtgcaggttgagaacgaaaaccactgtgattttgtgaagctgagggagatgctgatccgagtgaacatggaggacctgcgagagcagacgcacactcgccactacgagttgtatcggcgctgtaagctcgaggagatgggcttcaaggacactgaccctgacagcaagcccttcagtctccaggagacatatgaagcaaagaggaatgagttcctgggagagctgcagaagaaggaggagg

SEQ ID NO: 551 - DNA, 255 bp, Rattus sp.
actgagatgaaaagtgtcttaacttttagtatttcaaagccagctttaatttggaacagcaacaccatccataaaatccagaacaagttctcttgttaggaactttccatatgttatgatttggtcacaagttgatagttgttacatatcagtttccatttctccattagaaaattaggtaattgatggattctttgaacagaagcatcactacttattaaaaagttagatatatatagaatgcttttaaggcaa

SEQ ID NO: 552 - DNA, 255 bp, Rattus sp.
acaagctttttttttttttttttttttttttttcttcggagctggggaccgaagtgctctaccactgagctaaatccccaacccctcaccgttacattttgtgtggagcatcagtcgcgtgcctgagggtcttgcctatagagtctgtggtcatcctgttggccaacaggtattccttttgttggaccaattgcatttcccatctctctgtggtgtgatggaggtgtgagtcctggatgtaagtgcgaagagtcc

SEQ ID NO: 553 - DNA, 250 bp, Rattus sp.
acaaacagtgctgcagacacacgtgatcgttggactcctgggcaatcctaattgcctcctgcagggcgagctctgcctgttgatagtggccgaagcggcagtgcagggcagccaggttgagagcggcgtatcttaggctccggccataaccttcttccccattacttttgccctctgctccagtgagaatcaggcggtcaaaataatgaaggaggctgtgcgttgagctgaaaacatcttgaacacggag

SEQ ID NO: 554 - DNA, 255 bp, Rattus sp.
actgcccacccccaggagctgccaaatgtccaggctactgtgttctaaccaaatagaaacagagctctacacttcagttccacaaccacttctggccctcactgagccctgccaagtccttactctgccctacatgtattcccttttcacacgaggcctccaccctgcagacttacagaaggccgggatatggtttgtgctccttccctgcgggccttacataaagtgctcagaatcagagatccttgcactgag

SEQ ID NO: 555 - DNA, 255 bp, Rattus sp.
acagtcccagctctgctccagtctatgtgacttttgaaagacctttgttctgtgagctgtgatcatgtgcagtggaccagacctgcttccacctgcaggagagctgggtatccacattagccgcacctccccatccagcactgcacccacctgaggacattaactgggatttgatggccagcaacttgtatgcgattcattaagtggccctggcagagcagccacacccagctgcaaatctcggccaatgaggga

SEQ ID NO: 556 - DNA, 255 bp, Rattus sp.
actgttgtgggcagaagctctccaaagctcagactacatcctgtgggcagttcccaggtggggatgttcccctggccttcaccaccactgacttacccctttctccactttcagagacagcagtcctccacagggacttgtagaacagctagaaagggctgtagttcagccctggctgtggtcctcagcagagatgacagttctgtgaactctgccagtgcttccccatctgacatggaaaagtgctggacttgg

SEQ ID NO: 557 - DNA, 255 bp, Rattus sp.
actcttacggagaaccaagatttggttcctagcatcctcaaggtagctcacaactctttgtaactgcagtcactgggaatctaaccctctcttctggcttctgctggcaccaggtgagtgtgatgcagacaaaaactttaaaaaaaatgctacacatcatcttcagaaatagtagaagtatatttctatttgcaggctgttgagctgagtctccctgctggtggactttgtaactgacttgggaagttatgaagg

SEQ ID NO: 558 - DNA, 255 bp, Rattus sp.
ctgaggttctgggccgcccacaagcagtgagttgtcactgtctccttagggtggttggttagagatctgagtcatgccttcagatctcaaaccaaggccagggaggaatagatctaaaagccatgcttaccgtggagcacattctaagataatatctgctgatactggtaacagaggccagactccgagttctggccatggaaacaacatggccggtgcctctctgtttggcttctggactgcaataagccagtg

SEQ ID NO: 559 - DNA, 255 bp, Rattus sp.
actggtggcttttaattttcagcccacaaatccaaactccgctgtctccactttgcttagctgccccagaacctcaccaattgcaaatcctcccttttgtcttttgctcactctgaccatcttgtgaaccctctcttccccatccttcagtggccataccttctctggggaattttcatcccgagtcccaagatagagctccttggaaaaagctacccaagattatgggagtaaatgcaatgagtgatttctcct

SEQ ID NO: 560 - DNA, 251 bp, Rattus sp.
acaaagtatggcctcagtttctgactaatagcctcagaattcctgctgcacacaggcaggaggtatagcaagcttggacaccagaaacacatcactttgaccatcagtcgagctctgcccagcatagaatactgttagctacttccttaaacattttagtttctcaaagtgaaatgctgtccacttgagcagattgaggtttatgcacgagaattctctgaagtcctatgtgattcagaatgctctgttgc

SEQ ID NO: 561 - DNA, 255 bp, Rattus sp.
acttggcaaaaacattcaacatacactgaagccatatctttgtttactgaaactcaaacataattcttaatgctttcaaaataaatgttcttaaaaattttgtgttacggggttggggatttagctcagtggtagagcgcttgcctagcaagcacgaggccctgggttcggtccccagctccgaaaaatagaaaagaaaaaaaaattgtgttactcaactttaaatgttaaacagtaattttgacgaataattgt

SEQ ID NO: 562 - DNA, 255 bp, Rattus sp.
acaagactaattttattaagaagataaacaaatttattataaatttataaatattcttactaaccccagcaggaaacaccttgaattgaaacatatatggtagtttccagcatattaaagacatcagcaagacaccggattgatattttaactttttaaaactattaaaaccaatttaacacaaggcctttttgcccctcttgcaagactacctggaaggaatacatgtctccttgcctgtcaatgacacagatg

SEQ ID NO: 563 - DNA, 251 bp, Rattus sp.
actcatctaccttcaacagcactttccgtaactcctcgaagtagacagggaaatctgcttctacctgaaggtcttcaatagcaaaaaaggatgccatcgactggatgatatcaccagcaagatcaatatcatcagtattcaccgtgatctcaccacttggtttcatttttatgtagagctggccaccgttgcgtaaggacgtgaaacagacgtgaaacggggcgttctgaatgttactgtcttctggcaac

SEQ ID NO: 564 - DNA, 255 bp, Rattus sp.
acggattcacctccttccggctgtggtgtgcacaggatccacgctgggaattcattccacgtgggactaaaggcgtaaggcgaccgggtctcctgcttctgctgcgttcacctaaaacaccgcgttattgctcagcccacactgaagtatttgtttgccttcatttaaagaacatcccacttcacagctctctacagatgggcagctcccagggcgcttccgtttgtcttcagctctgacaggagcagattccac

SEQ ID NO: 565 - DNA, 255 bp, Rattus sp.
acgaggacctgggctagatttttgtgctttgtctttttcttcttttttttctttttgtttttttccttttgaaccagccaccttataagaagatgatttaccatatgaaaatgctcattccttcaggaaaactaatatctctatcttcatctatttttgtggaaatacaaaatggttggtttaacatagaggggatatttttgaagatgtaattgttttttgttttgttttgttttgttttacttaatcttgtag

SEQ ID NO: 566 - DNA, 255 bp, Rattus sp.
acgcacttactctagaccacactaacaagtttcagtgaccttgagggccaagcaatgtccccctggtaagagctcttgggctggtgcgtttttcagagcagagccactgcaggtaaactgtgcccagggccacggccttggcagagccttccctgtggaagcaataactagtttctgtgagagaacctgagccgggagagccgggcacgtagccagactgggtcacagcctgcatctctatccctgtgtcccctc

SEQ ID NO: 567 - DNA, 251 bp, Rattus sp.
acaaaatatttagtaatatgctttgccattcacagtgggcactttctgaaaaataaattttgttaatgtgcttagaaacaagaatctatttacagcctcagtcaaataaccaagttcttggtgaatgaagttacctcgggacaacagcatttaaaagtaaggtttgtgcaagccaccttcatattctttctggttgctgttgctttgcttttagagaggtcactggacttactatgttgctgagaatgacc

SEQ ID NO: 568 - DNA, 255 bp, Rattus sp.
acatgataaggaattctgaattcttagaattgactatctcagatcatatttgctgagaaaatttcttagtgttcttttcacagtgaacataatcctaagtccttggatatttttagaagtcttttaactttacacaaataatgaaataattttttttttaaattcaaagtgtctcaccctacttgttaatttgcccccaaggaaagttgtttttaaaagaaaaaaaaaaggatacttgtagagtgagtgaaatgg

SEQ ID NO: 569 - DNA, 255 bp, Rattus sp.
  modified_base (2): a, t, c, g, other or unknown
  modified_base (6): a, t, c, g, other or unknown
  modified_base (9): a, t, c, g, other or unknown
  modified_base (11): a, t, c, g, other or unknown
  modified_base (13): a, t, c, g, other or unknown
  modified_base (23): a, t, c, g, other or unknown
  modified_base (25)..(26): a, t, c, g, other or unknown
  modified_base (33): a, t, c, g, other or unknown
  modified_base (36): a, t, c, g, other or unknown
  modified_base (40): a, t, c, g, other or unknown
  modified_base (42): a, t, c, g, other or unknown
  modified_base (44): a, t, c, g, other or unknown
  modified_base (48): a, t, c, g, other or unknown
  modified_base (50)..(52): a, t, c, g, other or unknown
  modified_base (60)..(61): a, t, c, g, other or unknown
  modified_base (64): a, t, c, g, other or unknown
  modified_base (67): a, t, c, g, other or unknown
  modified_base (70): a, t, c, g, other or unknown
  modified_base (72)..(73): a, t, c, g, other or unknown
  modified_base (75): a, t, c, g, other or unknown
  modified_base (77): a, t, c, g, other or unknown
  modified_base (79): a, t, c, g, other or unknown
  modified_base (81): a, t, c, g, other or unknown
  modified_base (83): a, t, c, g, other or unknown
  modified_base (89): a, t, c, g, other or unknown
  modified_base (91)..(92): a, t, c, g, other or unknown
  modified_base (95): a, t, c, g, other or unknown
  modified_base (98): a, t, c, g, other or unknown
  modified_base (100): a, t, c, g, other or unknown
  modified_base (105): a, t, c, g, other or unknown
  modified_base (110): a, t, c, g, other or unknown
  modified_base (120): a, t, c, g, other or unknown
  modified_base (124): a, t, c, g, other or unknown
  modified_base (133): a, t, c, g, other or unknown
  modified_base (139): a, t, c, g, other or unknown
  modified_base (143)..(144): a, t, c, g, other or unknown
  modified_base (152): a, t, c, g, other or unknown
  modified_base (163)..(164): a, t, c, g, other or unknown
  modified_base (231): a, t, c, g, other or unknown
cnatcncancnangacatccttncnnagagggnccngaangngnccancnnnctccatannccnttnctncnncntntncncntacctnannccngcncnttttnggaanccccctttcncggnaaacctttnggaaancccnnttctcacnatacggcgagnngaggccctctagcatgcatgctcgagcggccgccagtgtgatggatatctgcagaattcggctttcnagcggccgcccgggcaggtaccct

SEQ ID NO: 570 - DNA, 255 bp, Rattus sp.
  modified_base (88)..(90): a, t, c, g, other or unknown
  modified_base (93)..(109): a, t, c, g, other or unknown
gtgatggatatctgcagaattcggcttagcgtggtcgcggccgaggtacttttaacwrwgggctgactttaaagctaagaacawggcnnnmtnnnnnnnnnnnnnnnnncccaatcccatataatactcaygcatggctttgcttatacacagacttctttccaccaccgttgttgaagtttttgaaggttggaaagggcaaacwcwhhhwattggctgctgaccaatgtckctcgctggctggtgctcaagacm

SEQ ID NO: 571 - DNA, 255 bp, Rattus sp.
caatgtttacagatgggtgacgtttgcactgccatagggaatggtgagactatgttaccagacccttagatttatgagtaggtggttgcagttaagcctatgagaggatctgttgagccttttaaggctaagctggtaagagttccgagacaggtggttggttagagtgatttcctagacctcacttgggtctttctgttgacagttcttcatggcttcaagcagataccatatgctttctttagaggagctgcc

SEQ ID NO: 572 - DNA, 254 bp, Rattus sp.
  modified_base (57): a, t, c, g, other or unknown
  modified_base (60): a, t, c, g, other or unknown
  modified_base (63): a, t, c, g, other or unknown
  modified_base (66): a, t, c, g, other or unknown
  modified_base (70): a, t, c, g, other or unknown
  modified_base (72): a, t, c, g, other or unknown
  modified_base (76): a, t, c, g, other or unknown
  modified_base (78): a, t, c, g, other or unknown
  modified_base (98): a, t, c, g, other or unknown
  modified_base (102): a, t, c, g, other or unknown
  modified_base (113): a, t, c, g, other or unknown
  modified_base (137): a, t, c, g, other or unknown
  modified_base (154)..(156): a, t, c, g, other or unknown
  modified_base (162)..(168): a, t, c, g, other or unknown
  modified_base (170): a, t, c, g, other or unknown
tttttttttttttttttttaaaatattctgcttgtkctcacagaaaaaataccattnacncanagncccnancaangncctaagtttttyaatggcancacnattataaaggntacaaatgacctaacaggaacaanaaaaaahhgtgttattnnnggcccnnnnnnncncttgagtttctaaactgtcagtaagcagtgaaaggtgtcggattaactacttggtaatggccaggaaaatacgatgaagatggg

SEQ ID NO: 573 - DNA, 241 bp, Rattus sp.
acaaggaatgcttctccctgtatgacaagcagcaaagagggaagattaaggccacagatctcctggtgtccatgaggtgcctgggggccagccccacacctggggaagtgcagcggcacctgcagactcatggaatagacaagaacggagaactggatttctccaccttcctgaccattatgcacatgccaatcaagcaagaggacccaagaaagaatccttctggcatgctgattacaga

SEQ ID NO: 574 - DNA, 255 bp, Rattus sp.
cttccttgaactactttcagaggccttgtaactcaggagtgcgaccaaccgtgcttgaacccccaggtctaaatgtgttttcaggcatactgcagaaagtaactatcataaattcctaatagctggaaaccaacatttcctaaagactaaaatttgtttcaaataaataaatgagcaaagtcaggtaataaccttttcaaaggtggagtttggtagtcttgagtgatactacctattcctgagttctctggatac

SEQ ID NO: 575 - DNA, 255 bp, Rattus sp.
acacggtggcacacatactaggatagatttgcttcaactaagccccacggggagatgcacttcatatcaaatttcctttttggttcctttgagggagaaggattctgtgggacttacaaagggctcatgtatatgcagaaagccttcccatcatttgtcattgtgacccgtggcaagccatcatcagtaggaaaacaaaacaaaacaaaacaaccaaacaaatgaacaaaaaaccgaggttagtctaaaatctaa

SEQ ID NO: 576 - DNA, 255 bp, Rattus sp.
cttattgataagtggatattagcccataagcttggaatacccaagatacaattacagaccacatgaagctcaagaagaagaaagacaaaagtgtgaatttttcagttcttcttagaagggggaacaaaatactcacaggaggaaaaatggagataatgtgtgaaacagagactgaaggaaaggccatccagagattgccacacatggggatacatcccaaatgtagtcacctaacccagtcactattggggaggc

SEQ ID NO: 577 - DNA, 255 bp, Rattus sp.
actttgtaaggaaggagaaagagaatgcaccctgatacaaaaaatattgcctatttatatattagcaaagatttatgaaacacattccaaatcaaatgttgctatggaaacaacagacttaagtagagaagcacaaagtcctgaagcacccgcaattattttaatcaggaaaaatgatatatttatatatgcatatgcatatatataatttgagaagaaataaaggcaaaattctaactttaatcagagtttgta

SEQ ID NO: 578 - DNA, 255 bp, Rattus sp.
acaaagaccttctttcatggactactttgataagcaggacttcaagaacaagagtcatgaaaattgtgatcagagcatgcgtgagccatgccctatgtcaaacaatgtttttcctgacaactggagagttcctcaagatggagactttgattttttaaaaaatctaagtttagaagaactacagatgcggctaaaagcactggaccccatgatggaacgagaaatagaagaactgcatcaaagatacagtgcgaa

SEQ ID NO: 579 - DNA, 255 bp, Rattus sp.
actttaaggaaatttatgtagcatttactcatccatcgggtatccggcccctttctattacccaggcatcagtgaacatcagcaaaaaaaaaagttatctttgtgaagcttactttctcagatattgttttaaaactatgccattataaaatagttatcatctagggttgagtaggtagcatttatgcagaaaggctacagtcccaaagcagctaccataaatattttggaagctattccttttcaccttaagat

SEQ ID NO: 580 - DNA, 255 bp, Rattus sp.
actgcatccccacccctacctcaagagtgcctcacttctacaccgagctcctcactcaaacttggcacccagggaataggatggttttctcaattagaaaagacatatatatccacacacccatatatataacttttttgtttttaacatttaaatataaaaatactactctgctttgagttataaatggaggaccaagaaacttttttcttcctttacagtagggccatttgtcaggtgaactgtgtttcatga

SEQ ID NO: 581 - DNA, 255 bp, Rattus sp.
acaatttagaaataaattatgaattattcctaaaaatatacaaatgtaaagtgaaaactgaagttcttctgtattgcatagtagttcagattctctgtggaaaccataaggctattttgtctactttgcatgaatacttcagacttgtatttcagagccaagcagtaactaaaatgtggaccttgcttttcagagataagagttcttaattatatgcctttaagtgtttccttctaggcttcccaccaagtgttt

SEQ ID NO: 582 - DNA, 255 bp, Rattus sp.
gcttagcgtggtcgcggccgaggtacctgtggtgtttgatatatagatgacagttagacgcttactagttctagccttcaaaggaggtagaccttgggtttcatcctataaatttctggtggtggtgataactcataaatgtatgtttgtatggtatttatcaactaaatagcagtagaaatagagatccaattcctttagtacctgcccgggcggccgctcgaaagccgaattccagcacactggcggccgtta

SEQ ID NO: 583 - DNA, 255 bp, Rattus sp.
  modified_base (1)..(2): a, t, c, g, other or unknown
  modified_base (6): a, t, c, g, other or unknown
  modified_base (11): a, t, c, g, other or unknown
  modified_base (13)..(14): a, t, c, g, other or unknown
  modified_base (28)..(29): a, t, c, g, other or unknown
  modified_base (40): a, t, c, g, other or unknown
nntagnacgtnannctcgggccctcttnngagcacgcttnagcggccgccagtgtgatggatatctgcagaattcggcttagcgtggtcgcggccgaggtactaatcagccttgaacatggtttacagctttctccttccgagcagttcttttcagagaagaaatcagttttgatcttttatagtccgtgcttgttgaaaacaagctttttctttcccccaatgatgacgcttcatttttgaagtgttgaagctg

SEQ ID NO: 584 - DNA, 255 bp, Rattus sp.
  modified_base (3): a, t, c, g, other or unknown
  modified_base (10)..(11): a, t, c, g, other or unknown
  modified_base (15): a, t, c, g, other or unknown
  modified_base (20): a, t, c, g, other or unknown
  modified_base (22): a, t, c, g, other or unknown
  modified_base (24): a, t, c, g, other or unknown
  modified_base (34): a, t, c, g, other or unknown
  modified_base (39): a, t, c, g, other or unknown
  modified_base (41): a, t, c, g, other or unknown
  modified_base (191): a, t, c, g, other or unknown
  modified_base (228): a, t, c, g, other or unknown
  modified_base (243): a, t, c, g, other or unknown
  modified_base (245): a, t, c, g, other or unknown
acnctactanntagnacgtnantntctctcgagnccacntntactatagggcgaattgggccctctagatgcatgctcgagcggccgccagtgtgatggatatctgcagaattcggcttagcgtggtcgcggccgaggtacaagctttttttttttttttttttttttttttttttaggatcacagatacnctgtttattcaaataaagcaagggaaacaaagggcgnctttcttaaactctntntatttaacag

SEQ ID NO: 585 - DNA, 255 bp, Rattus sp.
  modified_base (3): a, t, c, g, other or unknown
  modified_base (8)..(9): a, t, c, g, other or unknown
  modified_base (13): a, t, c, g, other or unknown
  modified_base (18): a, t, c, g, other or unknown
  modified_base (20): a, t, c, g, other or unknown
  modified_base (22): a, t, c, g, other or unknown
  modified_base (47): a, t, c, g, other or unknown
  modified_base (51): a, t, c, g, other or unknown
  modified_base (65): a, t, c, g, other or unknown
  modified_base (68): a, t, c, g, other or unknown
  modified_base (72): a, t, c, g, other or unknown
acnccctnntagnacgtnangngctctttggaataccacttctatanggcnaattgggccctctngangcangcttgagcggccgccagtgtgatggatatctgcagaattcggctttcgagcggccgcccgggcaggtactaaattggtagttcttgaagtctaactctgtgctaacagatcttcattttaaatagaatacggttttaatttttgataagctgctgaattttaaagagagttttttggggccac

SEQ ID NO: 586 - DNA, 255 bp, Rattus sp.
acaaaagtcctctcagagatcaaatggccatcctccggagatgcttcacgggtatggctttcagtcattctcaagttctagccatgggaccaacgttagtgttctgtgtcacgtagccacaggtcacggttacatgtcatggcttaggaaaatactggcattctggtttctgtgaaataagccttaccttgtgcattcaagcaaaagggaaaaacaggcaaaagaaaaaagggggatggggagaaagcactgtcg

SEQ ID NO: 587 - DNA, 255 bp, Rattus sp.
  modified_base (3): a, t, c, g, other or unknown
  modified_base (8)..(9): a, t, c, g, other or unknown
  modified_base (13): a, t, c, g, other or unknown
  modified_base (18): a, t, c, g, other or unknown
  modified_base (20): a, t, c, g, other or unknown
  modified_base (23): a, t, c, g, other or unknown
  modified_base (31): a, t, c, g, other or unknown
  modified_base (35): a, t, c, g, other or unknown
  modified_base (37)..(40): a, t, c, g, other or unknown
  modified_base (42)..(44): a, t, c, g, other or unknown
  modified_base (48)..(49): a, t, c, g, other or unknown
  modified_base (52): a, t, c, g, other or unknown
  modified_base (54)..(55): a, t, c, g, other or unknown
  modified_base (58): a, t, c, g, other or unknown
  modified_base (63): a, t, c, g, other or unknown
  modified_base (65): a, t, c, g, other or unknown
  modified_base (71): a, t, c, g, other or unknown
  modified_base (73): a, t, c, g, other or unknown
  modified_base (76): a, t, c, g, other or unknown
  modified_base (78): a, t, c, g, other or unknown
  modified_base (81)..(82): a, t, c, g, other or unknown
  modified_base (87): a, t, c, g, other or unknown
  modified_base (105): a, t, c, g, other or unknown
  modified_base (113): a, t, c, g, other or unknown
  modified_base (183): a, t, c, g, other or unknown
  modified_base (210): a, t, c, g, other or unknown
  modified_base (213): a, t, c, g, other or unknown
  modified_base (223): a, t, c, g, other or unknown
acnccctnntagnacgtnangtngtctcagncganannnncnnnaccnntcncnnctnccccntnctcccncnctncnccnnattcnttcgaatccacttttgantacccgtngaattgggccctctagatgcatgctcgagcggccgccagtgtgatggatatctgcagaattcggcttagngtggtcgcggccgaggtactgtaatgntgncaataatggnggaatatatatagtttgacagaatcatattaa

SEQ ID NO: 588 - DNA, 255 bp, Rattus sp.
  modified_base (3): a, t, c, g, other or unknown
  modified_base (8)..(9): a, t, c, g, other or unknown
  modified_base (13): a, t, c, g, other or unknown
  modified_base (18): a, t, c, g, other or unknown
  modified_base (20): a, t, c, g, other or unknown
  modified_base (22): a, t, c, g, other or unknown
  modified_base (30): a, t, c, g, other or unknown
  modified_base (37): a, t, c, g, other or unknown
  modified_base (39): a, t, c, g, other or unknown
  modified_base (43)..(44): a, t, c, g, other or unknown
  modified_base (49): a, t, c, g, other or unknown
  modified_base (54): a, t, c, g, other or unknown
  modified_base (59): a, t, c, g, other or unknown
  modified_base (61): a, t, c, g, other or unknown
  modified_base (70): a, t, c, g, other or unknown
  modified_base (123): a, t, c, g, other or unknown
  modified_base (142): a, t, c, g, other or unknown
  modified_base (154): a, t, c, g, other or unknown
  modified_base (172): a, t, c, g, other or unknown
acnccctnntagnacgtnantntctcgaanccctttntntaannccttngaagnccacntntcactatanggcgaattgggccctctagatgcatgctcgagcggccgccagtgtgatggatntctgcagaattcggctttngagcggccgccngggcaggtgcttcagaantcaccaggacttcacttttaggaaaaaccttgtggcagccaaggaccggcacacacagatccaggaggaactgcagacaaatg

SEQ ID NO: 589 - DNA, 255 bp, Rattus sp.
  modified_base (1)..(2): a, t, c, g, other or unknown
  modified_base (6): a, t, c, g, other or unknown
  modified_base (11): a, t, c, g, other or unknown
  modified_base (13)..(14): a, t, c, g, other or unknown
  modified_base (24): a, t, c, g, other or unknown
  modified_base (31): a, t, c, g, other or unknown
  modified_base (33): a, t, c, g, other or unknown
  modified_base (36)..(37): a, t, c, g, other or unknown
  modified_base (40): a, t, c, g, other or unknown
  modified_base (42): a, t, c, g, other or unknown
  modified_base (44): a, t, c, g, other or unknown
  modified_base (56): a, t, c, g, other or unknown
  modified_base (64): a, t, c, g, other or unknown
  modified_base (66): a, t, c, g, other or unknown
  modified_base (113)..(114): a, t, c, g, other or unknown
nntagnacgtnannctctttgaanccctttngnaannccntngncccctttgaccnctttagcngncgccgtgtgatggatatctgcagaattcggctttcgagcggccgccnnggcaggtgcttcagaactcaccaggacttcacttttaggaaaaaccttgtggcagccaaggaccggcacacacagatccaggaggaactgcagacaaatggagatacaaacagtcccagggacagcaacagtcaccccatc

SEQ ID NO: 590 - DNA, 255 bp, Rattus sp.
  modified_base (4): a, t, c, g, other or unknown
  modified_base (12): a, t, c, g, other or unknown
  modified_base (28)..(29): a, t, c, g, other or unknown
  modified_base (32)..(33): a, t, c, g, other or unknown
  modified_base (36): a, t, c, g, other or unknown
  modified_base (43): a, t, c, g, other or unknown
tttntaaggccnattgggccctctttanncannctntagcggncgccagtgtgatggatatctgcagaattcggctttcgagcggccgcccgggcaggtacaagtgtgtgctaaaagtgagtcttagaccccagatactttgtcactcatattacaaagttgacatatttggctaaaatcagtctgaagatttttattcactgagaactatggttattaaaaccaagctgttgacgaaaatataagttaaaaata

SEQ ID NO: 591 - DNA, 255 bp, Rattus sp.
acctttgggagtcgccttcttcggctgtggagccctggaagaactctgaagggcgtcctgtccgatttgctcgtccatgcacacagatggaagcagccgccattggaggggaggaatgtgtccttggtctgaccgacaggtgtcgctttttcatcaacgacactgaggttgcatcaaatatcacgtcatttgcagtgtgtgatgactttctactggtgacaacccattcccacacctgccagtgtttctctctaa

SEQ ID NO: 592 - DNA, 255 bp, Rattus sp.
  modified_base (2): a, t, c, g, other or unknown
  modified_base (7)..(8): a, t, c, g, other or unknown
  modified_base (12): a, t, c, g, other or unknown
  modified_base (17): a, t, c, g, other or unknown
  modified_base (19): a, t, c, g, other or unknown
  modified_base (21): a, t, c, g, other or unknown
  modified_base (30): a, t, c, g, other or unknown
  modified_base (34): a, t, c, g, other or unknown
  modified_base (39): a, t, c, g, other or unknown
  modified_base (159): a, t, c, g, other or unknown
cnccctnntagnacgtnantntctcttgtngacnacgtntcactatagggcgaattgggccctctagatgcatgctcgagcggccgccagtgtgatggatatctgcagaattcggcttagcgtggtcgcggccgaggtacagcccatctagccctcagntgccagagggacctctcctacaaccttataatgtaagtatgccttgcctctcgcatcccccaccttagtgaaaactattgccttacacctagtcac

SEQ ID NO: 593 - DNA, 255 bp, Rattus sp.
acaagatccccacctgtatgcaattctctgggtcatctgtatcctcacatcttcaagagaaacctcacccatgaacacggcaccattaagcccctttctgtaatggatttcaatcacatttactgctgagattactcaggcaggtgagctgatgctggacacgaacccctcagtaaagtgcagttttaggcaaccccttagttttcctttagacaggtatccacagtccataaggactttttttcttatctattt

SEQ ID NO: 594 - DNA, 251 bp, Rattus sp.
actctgcttgttgagaagcagccagtggctgaacctgagtaggtgggttaaagtatctgtgcctcatgacacagacggttgtaaaaatctgaagtgtattttatcagctacctggatgtcagtgcacacagacgtgcactcttctcatgactgcaacagtgatcgggaagaggaaaaccctcaactctgcctttggctctgtgaactaatttcagttcagattctaagctgtgctcactcccattttgaaa

SEQ ID NO: 595 - DNA, 255 bp, Rattus sp.
ccgctccacaagcacatgcagcgagacttgatcagtgactagtccctgtcgtcgcatcagcagctctaagtcctttggcttcacagtcttacggccggcatgagcagcaaatacctccagatcattgcaaaggcgctggaaatactcgtctaggcacttctctaccatctcaagagccactttctccacgggcatcttagtatggaaactgaagagcttcacatagtggctcagtccggccttgtaggggtcttg

SEQ ID NO: 596 - DNA, 255 bp, Rattus sp.
caggacacactatagccagctgcgcggccgggctgagggctccagtttctgcacagctccagaggctttccaagttaattctgaacatggctaaaggaagagaggccaacattttctaaattgcaccaaatggcctgaaagtgtaaaaaacactagatttttctttaaaagctaatttgggggtggtagagttaagggaaatgtctatatgtattttactcaagcaataaaattagaataaggatacagttttgc

SEQ ID NO: 597 - DNA, 255 bp, Rattus sp.
accttttagtgagggcccttaaatttgggaaagttccatggacagctaagtttattcttgaacataaaataaggaggaaaaatgaacttatgagaacacaattgaagaaaagggaaagaaaggtttaagttcagttgcatctagattcgaggaaacatgaataaaatttgattagattccgtaattacatgggtatttattttgaacgcacatgttaatgtatgcctgcttactgattgagcatctatgagccga

SEQ ID NO: 598 - DNA, 255 bp, Rattus sp.
acacactcccaaacagttaaacccagctctgattccaactctgcaagagcttttaaacaagtgcaggacttgtctgcagcagagaaactcactccaagagcaagaagccaaagaaaggaaaacgaaagatgatgaaggggcaacccctgttaagaggcggcgagtgagcagtgatgaggagcacactgtagacagctgcattggagacataaagacagatgccagggacgtcctgacccccactagcacctcaga

SEQ ID NO: 599 - DNA, 255 bp, Rattus sp.
acagtgagcagcaacgacaagaaaaccaaaggccggacaggctggccacagcacgtctgggccctggagctcaagcagtgacgaagaggagagctagtgagccgggggccaaggcgccagatgctgacccaggactccccgaaagcccttggtctctgttctgaggacttcttgcagttggatcatccggtttatttatgtgcaatttccttttccctctttctgcccccccccaacctttgaggcatctgctcc

SEQ ID NO: 600 - DNA, 251 bp, Rattus sp.
acatatttcagtagcatgaggccgtccagggtgtgcatgagcaagaccatgatgccaggattatttattgctaacagaaatggctacctttgtaaatagacctcattgagccaatcactgaactctttgtaagcacatttcccccaaagtccagtgtttagacgacagtggcaataatgtattcattctagtagtcagtggtaaccaggcagcttgtataggacattgatatttaccctggttgctgtgaa

SEQ ID NO: 601 - DNA, 255 bp, Rattus sp.
accacagaagaggagattcaagaaatctgcatagagacacttagactttataccaggaaaaagcctaactatgaattgctggaaaaggaagtagaaaaaagaaaagtagccttacaggaggccaagttaaaggcaaagggattgaatcttgatggaactccagccctttccactttaggtggtttttctccagcctccaaaccatcatcaccaagagaagtaaaagctgaagagaaatcaccagtttccattaat

SEQ ID NO: 602 - DNA, 147 bp, Rattus sp.
acacacaaatactcttcttgttctgataaaccctggatgcttgcagtgaacttttctagtgtatttctcatttctcgttcgctctgctttaacttaactatggcttcttcatgttgtacctgcccgggcggccgctcgagccctata

SEQ ID NO: 603 - DNA, 255 bp, Rattus sp.
acaaagaactcagtgtcttccggagcaagacacaatggttgccacggggagaggccagggcagccaagtcacccctcctcagaggggacaggctccaccatcaggttcatcagtttttgaaaataaaaacaggaccagaaacagtgtctgtttggttgctggtgctccccccaccccacagcaatgctgaagtctgtccatccagttccaagcaaatacagagcaattccaaccaacacccatctttgaaaaagg

SEQ ID NO: 604 - DNA, 255 bp, Rattus sp.
acacatatatttatattttgcttgtcttcccgtctaggtcatcagtttctacctttaagccatttatttaaaaagctattgcactgtcttggtgaacagtgtgtggggcttcaataaaaaagggtcttgtgcgtgtctacatggttccacctcttactttccaactgtttaaaaaaaacaaaaaagtcgcatatcccaaggcaacaaaccccacagaattcccgaaccaatgggcgttgcaaaaggaagtggagc

SEQ ID NO: 605 - DNA, 255 bp, Rattus sp.
attttgtggcacatgacagaacagaacgaaataactaaactgttatgacattaacggttaccatgcatttagagtttcacatgtaactacaaacttatttaaatttcacaaagtttgctaaacatgccgaccatctatgtgtgcactgacaagcttatgttaaaaacttttaagaatactctcccctttagattttttcaaagcttttgttttgattacaaaatttcaaaggcattaagcaattaagagaatata

SEQ ID NO: 606 - DNA, 255 bp, Rattus sp.
acctggaaaggctgaagctggggtgttctccgaccaatgggaattccacggtcccttccctcccagataacaatgccttgtttgtgactgccgcaccaccctctggggtgccatccagtataagatagagagctggggcccctcccccaccgtgtcatggcacatgtcagagggagagaggcttttttacttctaacacatctgactgctgctggcagactctagatttgccatgcaggggtttcaaataatttg

SEQ ID NO: 607 - DNA, 255 bp, Rattus sp.
acagctcctgtgagtcagcacacagcaagaccgggcttctgttgggcctttgtgacttcttacaggtttccaaattggaaaggacaattcatttgggtattcaaccttgctaggccccagcaggagataggctaatatctaattagcttattagccatgccatagtcccctgactggaaatggctaccttgcccatgctaaggtagatatgccaagagcctgcccggctctgccctgccaccacagagacgctat

SEQ ID NO: 608 - DNA, 255 bp, Rattus sp.
acacattctgaagtcaccctgaagattaactcagccgagcaggaaataaaattgctcaccgagcgcctgaaagatttggaagacagcacactacgaaacatcagaacagtgagcaggcaagaagaggaggatcttctgcgagtagaggcgcagcttagctcggatacaaaagcagttgagaagctagaagaagagcagcgcacgctcctagccagagatgaagatttgaccgataagctttccagctacgagccc

SEQ ID NO: 609 - DNA, 255 bp, Rattus sp.
aaagaatcatttaatgtgggggcagaactggcacagacagaataaataatagtgctttggggagagtagtgatgaactgggtaggcaagaaagagcctcagtgtggacgtgatcacacagataacatggagatgtgcaaagttgcggagtccatgacagaaatggcccaacccacccagatagcttctctatttggttgtcaactacagggaacagactaggcccggtgagcacagggttgggagactggagaaa

SEQ ID NO: 610 - DNA, 200 bp, Rattus sp.
acctataacatcacaccaaacaatatcaactttatataggtatttgtcaaaaaaaattaggccatttctgccaccattcacaagcttaatatgttgctttattttttttcttgagtccctgataaaataaaataattattaaaccataaaataaccttttccacttctaatcttctgaaagcaacaggcactttgatgtg

SEQ ID NO: 611 - DNA, 251 bp, Rattus sp.
acatgaaataatactgtgcttccattggattttcttttccagtgtgggaattgtgaggagtgctgtggatttgctctcttcatagcagtgttcctgatggaagtttaacctctacaaatttgctgttgacgtagtgtgattgaaaattggcctccttaagtgggcctcctattagtcaagattagctggcttgattgtgtaatctgcaacaaaaaggacaatgtttccttagtctctgatggtaggcagag

SEQ ID NO: 612 - DNA, 255 bp, Rattus sp.
acataaaaagatatttacagacataaaaacattaaaatagacttcagaaataaacaggactctacaaaggatacttaacactgaaaagctcatactgacaaacatttaaattgacagactcaagttgataggcacataatacaaatttggtaaaacgtgtctcagaggctaacactgaagcacatctgttttcaagactccataaaaaatccagacttcacttgccaaaaagtccaatcaattttgtcttagcat

SEQ ID NO: 613 - DNA, 255 bp, Rattus sp.
taagttgtggctataattgcatagaatacagacgttgctttaactggaagaggttgttatagataaccttgattatcacccagatggcatttagaaccactatggaaacacccctgggtgggtctttgagggtgcctccagaagaggtttaacagagaagagggaaggcccaccctagacaccagtagcaccattccacggactggggttataggctgaatataaaggtaaaagcaacggagcacccgcactcat

SEQ ID NO: 614 - DNA, 255 bp, Rattus sp.
acctcttattgaaatgaaaatttagatgtaatatataaagtgctagcgtttagttcattgcctttgttgagatagtcattttaacatttagaattcaacaatattaataaatataatttcgtagcatgctttcaaaaaaatgaccatttactaaggataaaaagattaaaaaggggtgcctgcagagatggttcaatggttaagtggtcctgagttcaattcccagcatctacatggtggctcacaatcatctaa

SEQ ID NO: 615 - DNA, 255 bp, Rattus sp.
acattgggaaggcagtatggtcatgggagatcaacaagcacagcttggtagggtaacccgccatgaaatatcactggctttaataatttactacaactgttctttttattcacactgataggacgtgcttccacctgtcgcatggaatatgaatatatacaacaaagtgtggcttatataaaaaaaaaagaaacctccatatggacaacgggggggccaaaccaatgacacatgcagtttgctaattacaaccac

SEQ ID NO: 616 - DNA, 251 bp, Rattus sp.
acacacagtagccactccctaccacctctttcttgaaaagtgaaatcttttaagcagggaagctcagcatcagtttactgcagctgtgattttacaataacctttctatattgagcctatggggtatgaagatatgcaaaatcctgttcgtttagagccaataaaagtttaactgatggtcaatactggtttagaaattttaggtcttctaaaccatagctttttcaggtctgaaatcattttattgccaa

SEQ ID NO: 617 - DNA, 255 bp, Rattus sp.
  modified_base (249): a, t, c, g, other or unknown
acttaagccacattatagaaataaggcatttttatctagtaaaaagcttacattccattttgagatatatgataaatttagaaatgattcattcatggaaaaatgtagagttacctgtataggtgcctatcctaggcttagagagagatgagtagacagagaagttcaggctgagattgggcagaggaagcataggcagcagaaaatgctaagtagtttagatattaagttaatagatcctgatatagnggctcc

SEQ ID NO: 618 - DNA, 255 bp, Rattus sp.
acaagctttttttttttttttttttttttttttttttttttttaattttataattattttaataaccaggtttacattaacagtcacttgatgagcttttttgtttgtttgtttctttattctcagctaactcaatacacagttttcttcacggttcaaaccaaacagcttttccatatctgagctgcctcacagctagcacaggtcacaaggagactcactggctgtccatagccaccagacacagaactgaac

SEQ ID NO: 619 - DNA, 100 bp, Rattus sp.
accccaaaatacaagcaaaccacaatggatgctgtaaaatccatttctggggcaaaagtgttttttgtttgtttctgttttttggttgtttttttttttt

SEQ ID NO: 620 - DNA, 255 bp, Rattus sp.
acaatgaagacttaaaacgtcaatataaaatgtaaattaattcattaagaaactgaaatttatggactctgcacaggtgaacaggtagctgttttaaatgtctttcttttctatagtaaatatatatttcatttaatggaatcacaggaaaatacaactatagtttcaaagcgcagtctgtaaactaacacattatatatgaaaaacactttacctttttcccactccaagagtgagctttaaggggctcaagag

SEQ ID NO: 621 - DNA, 112 bp, Rattus sp.
tttktttgctttaattctccatatktttamagtgcaacaadgttcaamaaactactgacagtaataacctaggacgtcacagtaatgggactttcagaattaaactgctcag

SEQ ID NO: 622 - DNA, 253 bp, Rattus sp.
actcttacggagaaccaagatttggttcctagcatcctcaaggtagctcacaactctttgtaactgcagtcactgggaatctaaccctctcttctggcttctgctggcaccaggtgagtgtgatgcagacaaaaactttaaaaaaaaagctactctyycttcagaaataatagaagtatataaataaawamaggctgttgarctgagtctccctgctggtgactttrtaactramttgggaagtaatgaagga

SEQ ID NO: 623 - DNA, 255 bp, Rattus sp.
  modified_base (158)..(159): a, t, c, g, other or unknown
agcttttttttttttttttttttttttttttttgtttgtttgttttgctttgtttttaataggcatgcaaagattaaagtagtgaaataaaaaataaatgaccctagattgggcaaagaaaaccatctttatgaagaagaaatttaaatgctggattnnwaaatttaaaagacctggccttatgggtgggtgtttatcggtaatttaaaaccaggcgaagttggtagtaggcaaatttttaaaaagtgatagagt

SEQ ID NO: 624 - DNA, 255 bp, Rattus sp.
acaggaactgagaacactggatatagccctcctccatctcctcacacttgtctgcagcggtttcgatgtcactgatggtggaggcaaagatagcggctccactctccaccagctgcttgcagaggtggacactgttgcaagakgcggcacagtgcagycgtgtccatccatcactgtctgcagcattcacattgacaccaaagtccagcagaaacttcacgatatggtggtggccagcacagacagcattgtgta

SEQ ID NO: 625 - DNA, 255 bp, Rattus sp.
actcatacataaagacaataaataattaaaaaaatgaaagacccaagtccaagcctgtgtaacagaagcacttgggagaagcagcaaagtatgaagaaagtgcagcagccatcgcttaacaatatctcactgcataaggactgctagactgaacaatatctyactgcataaggaccgccagactgaacaatatctcactgcataaggactgccagactgaacagtatctcactgcataaggactgctagactgaa

SEQ ID NO: 626 - DNA, 255 bp, Rattus sp.
acaagaaaagagagtttcgcctacaagtgcctctcatgggcagggttctgttcctggtgcagactaggaatgttaactcccttggttctaggaccagcatatcttaatctttcaacgaagcagatgatatggaagtcctctggagactgaagccacttgtcttagtctcttgagcaaatgaacagacactgctatcatttgacaaggaattcagactcagaacagagacaacaaagtattttwdwadataattat

SEQ ID NO: 627 - DNA, 255 bp, Rattus sp.
  modified_base (166): a, t, c, g, other or unknown
acctgcactcaaagcggctacaccttgagtccccattccacacgcatcakaygtgaagcaatcctgggtagtcagccttcccttgaagtcacaagtgccacttctgatattagaatacttcactgccaggtgtttctctgamtctcccctcgatgtggttcccwhnwggcagctgctgtgtttggtaagactggttcccacaggatggtaaatatactagtttatctgatgatgctaacatgctgactcaggggc

SEQ ID NO: 628 - DNA, 255 bp, Rattus sp.
actgaagawaagagtttttatgacttaaaggatacgttgttttttacacagtggatagcttgacagtttgttcttgatactgccatcagggacacccttgttttgaatgggcttccttgctatggtgggaaacactaaggaacattgggatcctatgddctgttggttgcaatgatgctggcttctggacagtcctctgatgtgggagattgtggttagacatccaaagcatcactccagtcagccacagtgact

SEQ ID NO: 629 - DNA, 215 bp, Rattus sp.
acaattaatgtatacttagagaaaccaggataaacatttctactatattttaactgaacttgcctagccaacattttcactgagaaatttatcaaatatgctgtaagattctacaaaattgtgagacatacctagcttcaggattatttcttatgcthhttcttattttggttacacataatctgctcagattctacagtaatgcttctagatgt

SEQ ID NO: 630 - DNA, 255 bp, Rattus sp.
  modified_base (7): a, t, c, g, other or unknown
acaagcntttttatttttttttttttttttttttttttttttttttttttttttttttttttttttttttttttttttttttttttttttttttttccccaaaagggaaaatttaaaaaaagaaaaaaaggktataatgccmaaaamaaaaaaataaaacccaaaacmgatraaaaaagaggggagggggaaaaacmacccaccgacmaccagggcgggcgctggggcagggggatttggattmagggaaacmgg

SEQ ID NO: 631 - DNA, 255 bp, Rattus sp.
acattaaactttacactattacatgtcgaacccaacgtttccacatgggtctgtttgcaaagrtcatggtcagtggatttcattttctacaacaaaaaccatggcaactgtttttggcaaagarattagaaaaatatgagcttagagttagagacgagaatctgtgggttaaagcatggatgcatggrgagccttccatccagaggctcccacagttctgcctttcatgcagctaacttaagrggrtrtttsrgc

SEQ ID NO: 632 - DNA, 254 bp, Rattus sp.
acaagctttttttttttttttttttttttttttttttaggggaaagtttactattcctttaatcttgtaagaacactgagagaaaaaggcagggtatgtagaatatggataaattcccttataaaactttctttacacaactttagcagattaayygtaaahttgatgggaataargttcacacattttcttgtttagtaagggtatccatgggggtaactttmattttgacgggagcacctggttwgcyatcc

SEQ ID NO: 633 - DNA, 255 bp, Rattus sp.
  modified_base (4): a, t, c, g, other or unknown
  modified_base (16): a, t, c, g, other or unknown
  modified_base (38): a, t, c, g, other or unknown
  modified_base (51): a, t, c, g, other or unknown
  modified_base (79): a, t, c, g, other or unknown
  modified_base (98): a, t, c, g, other or unknown
  modified_base (115): a, t, c, g, other or unknown
  modified_base (188): a, t, c, g, other or unknown
  modified_base (238): a, t, c, g, other or unknown
  modified_base (255): a, t, c, g, other or unknown
actntctgtgtgactncagatgttcctcatccagctgntcctcaataggtntttcctggggaggattccaccacttggncgcgatgccaggattcttnttcacagcctgactccnaatgagttccctccgctccttctccagctctatcatctcctcagagggcctcactttccggatgcagaactgntccttctcgtgctcgacctcctcaaagagcttggagggcttcttgcctcntggaaggcacgcagctn

SEQ ID NO: 634 - DNA, 255 bp, Rattus sp.
  modified_base (18): a, t, c, g, other or unknown
  modified_base (26): a, t, c, g, other or unknown
  modified_base (56): a, t, c, g, other or unknown
  modified_base (67): a, t, c, g, other or unknown
  modified_base (71): a, t, c, g, other or unknown
  modified_base (93): a, t, c, g, other or unknown
  modified_base (104): a, t, c, g, other or unknown
  modified_base (106): a, t, c, g, other or unknown
  modified_base (109): a, t, c, g, other or unknown
  modified_base (111): a, t, c, g, other or unknown
  modified_base (113): a, t, c, g, other or unknown
  modified_base (116): a, t, c, g, other or unknown
  modified_base (128): a, t, c, g, other or unknown
  modified_base (150): a, t, c, g, other or unknown
  modified_base (171): a, t, c, g, other or unknown
  modified_base (174): a, t, c, g, other or unknown
  modified_base (182): a, t, c, g, other or unknown
  modified_base (202): a, t, c, g, other or unknown
  modified_base (234): a, t, c, g, other or unknown
  modified_base (244)..(245): a, t, c, g, other or unknown
  modified_base (249): a, t, c, g, other or unknown
acatggccggaacaccangagtatgngacatgcgagccccagtccaaggaccaggntcgctggaagngcanccagcccagtgccaagcacggnccggggaagcngnctnananatnccagccgcttanacgcctttcaccttgggcaagnagaccaaggaaggacacagcnacnactacatntccaaacctacctaccatcnggaaacccagtgcctgaatgatgaaggtgacnggcaatggcnnaatnactcac

SEQ ID NO: 635 - DNA, 255 bp, Rattus sp.
ctatctgtttctatgatttcccgagatttctgggaggatttacttgctgacttgtatttctttttctctgctgtaggtcgaggggaagatttcgactcctttttgatgttaggtttccttgagcccttggtggctgccttatgcctgctggagggcatgctggtagccatgtccacaggggtctcactttctatcttcaggcctccgcggggctcttcagcagctgacttctcagtttttttgggttggtttttg

SEQ ID NO: 636 - DNA, 255 bp, Rattus sp.
actttgcccagactcgaggcctgagggactgaggaaaaccaaaactccactcccctaccccgcctcccgatttggwttccacacattggttcctctgaatgctgcttgctttgctaagtttgggcatgtaagaccttaaggggtggtgtgtgccawgmmtgcccatgtttctaggcagttttagcttgtgtcttcacatagatgagagcctactgtctgtcagtgaaaaragtggtgctccagggatatggtgct

SEQ ID NO: 637 - DNA, 255 bp, Rattus sp.
  modified_base (47): a, t, c, g, other or unknown
  modified_base (139): a, t, c, g, other or unknown
  modified_base (148): a, t, c, g, other or unknown
  modified_base (154): a, t, c, g, other or unknown
  modified_base (216): a, t, c, g, other or unknown
acaagctttttttttttttttttttttttttttttttttgggaaganaattttattagcttcacgagaaagagctgccacgagcaaagacctgcttggggataggactgtggtggcttccaaccaaaatcgtagatgantccacctgntccctncacatctgtggaaagagtctaagcgtgacacccaagaacaccttactggcttgccctctggnatagacacagacttgggcaaagcaacccttgctggacat

SEQ ID NO: 638 - DNA, 255 bp, Rattus sp.
  modified_base (149): a, t, c, g, other or unknown
actgtaagcgagagtccgctgcctgtcctgccaggcagcgttctgtgaaggctctcagagacgctcgctcttgcacacgtctgactccgtgtcaggctcaggtcctgggagagtgaaggggtggacactcgggggtggggggcttgcanagaacacaggtatttccagatagtgtcagcttatttgaaaattaattttctttgttaaaaataactattttaacccttgagtggcttctttttaaaccaaaaaact

SEQ ID NO: 639 - DNA, 219 bp, Rattus sp.
  modified_base (16): a, t, c, g, other or unknown
  modified_base (75): a, t, c, g, other or unknown
  modified_base (93): a, t, c, g, other or unknown
  modified_base (123): a, t, c, g, other or unknown
  modified_base (155): a, t, c, g, other or unknown
  modified_base (194): a, t, c, g, other or unknown
  modified_base (197): a, t, c, g, other or unknown
  modified_base (199): a, t, c, g, other or unknown
  modified_base (211): a, t, c, g, other or unknown
  modified_base (215): a, t, c, g, other or unknown
gtacaagctttttttnttttttttttttttttttttaggaaagcagagatccactgagtttattttctcaacggnttctgcagtgaccatagngaagaacccacagcagctgggccccagggncacaagggatgctgcgctggacatcaaaaggngacagactgaaatgagcaggactgagctgctggcttggnctntncacaccagcggncttnacct

SEQ ID NO: 640 - DNA, 255 bp, Rattus sp.
  modified_base (8): a, t, c, g, other or unknown
  modified_base (10): a, t, c, g, other or unknown
  modified_base (22): a, t, c, g, other or unknown
  modified_base (151): a, t, c, g, other or unknown
  modified_base (159): a, t, c, g, other or unknown
  modified_base (174): a, t, c, g, other or unknown
  modified_base (211): a, t, c, g, other or unknown
  modified_base (226)..(227): a, t, c, g, other or unknown
  modified_base (241): a, t, c, g, other or unknown
acagcagntnaggtaaggcagngaaggggagctggcctctctcacttaaacaatccaggaagtccctgacgttgggtggagccaggttctcagtcacatctctacacaagaagagcatcatctccttctcatcctcatcaagagactcctncacctggngaatgacctcagcanacacagtgctcagggccatgttcagaaccgcagaagncaggctctgggccannctccatccgttcancagggctccgggaa

SEQ ID NO: 641 - DNA, 255 bp, Rattus sp.
acttgagcttcaatcccccccagcctagtcgaggccatgaccgcctggatttgcctgtgactgttcgttccctccaccgaccctttgatgaccgagaggcacaagaacttggtagccccgaggatcgactgcaggacagcagtgaccctgatacttgcagtgaggaggaagtcagtagccggctgtccccaccccacagtccacgagacttcacccgaatgcaggacattcccgaagagacagaaagccgagatg

SEQ ID NO: 642 - DNA, 255 bp, Rattus sp.
actaccgaggagcacaagccgccatagttgtgtatgatattacaaatgaggagtccttttcgagagcaaaaaactgggttaaagaacttcaaaggcaagcaagtcctaatattgtgatagctttgtcaggaaacaaggctgacttagcaaataaaagagctgttgacttccaggaagcacagtcctatgcagatgacaacagcttattatttatggagacatcagctaagacatcaatgaatgtaaatgaaatat

SEQ ID NO: 643 - DNA, 255 bp, Rattus sp.
acgtgctgaggtggagctgcaccgactttgacaacattcttatgactgtcagctgcttcgaaaagtccgaggtattgggtaatcagaagcagttcaagaactttcagattgaggtgcagaagggccgctacagcctgcatggctctgttgaccactttcccagcctgagagacctcatgaaccacctcaagaagcagatcctgcgcacggacaatataagctttgtgctgaaacgctgctgtcagcctaagcctc

SEQ ID NO: 644 - DNA, 58 bp, Rattus sp.
tcagtcaccaccactgacccagaacgcaggcagttcctgctaccccctcaaaggggtg

SEQ ID NO: 645 - DNA, 255 bp, Rattus sp.
agcttttttttttttttttttttttttttttttggtaggctaatcaattttattaactcgtgctcttgcaagacatttgtcctgagaaagttcaagacacactgccatagtagggagaaagatcacagggaaaatggagatgggatttaggttttgaaggactgtagcaaaatgtcaaggtcctcagagaaagggagtttgttttgtaagttaattaaaagttgcctgctctgtaattgcagaagttgtacctgc

SEQ ID NO: 646 - DNA, 255 bp, Rattus sp.
  modified_base (85): a, t, c, g, other or unknown
actgtttgawttcatggactctgtttcagacttgaagagcaaagaaattaaaagagcaacgctcaatgagctggktgagtatggntcgactagccgtggkgctaattgttgaatcagcgtattctgatattgtaaaaatgatcagtgctaacatcttccggacacttcctccaagtgataacccagactttgacccggaagaggatgagcccacacttgaggcctcttggctcacatacagctggtgtatgaatt

SEQ ID NO: 647 - DNA, 137 bp, Rattus sp.
  modified_base (79): a, t, c, g, other or unknown
acagagaccttaaaccagaaaacatcttgttaaacgaagacatgcacatccagatcacagattttggaacagccaaagnattatccccagacagcaaacaagctagagccaattcatttgtaggaacagcgcagtat

SEQ ID NO: 648 - DNA, 255 bp, Rattus sp.
actgctttaagatgcaacagaagcagggctgatgggagcatctttcttgaggaggcgtgtcttgtccaggccattctccctcggggaatgtgctgggcttcctcgaggggaagatggatcctcattggacacatcaactaccaagttgtcatcactcttctcaccatcactgtcatagcgagctgcaatttccttctcttctgttttctgcttcttgctctctgaggaatagtctgtagagttcctgtgtttctc

SEQ ID NO: 649 - DNA, 255 bp, Rattus sp.
actgtggatgtgaatgtgggaagtaattttaatcatgtgtaattggtcacaaggctaatctgcagtaactcttgctgttctatttaacaatgccttgttgctttgtatgcattaacgtttgggtgtaaagattgtgtgtccatccaacagggagccacagtatttaaattgaccaacctgatgttacaactttgaggtggccaaatgtaaactaaaagccttaattaaagtggtgcaattttgtataacttaagc

SEQ ID NO: 650 - DNA, 255 bp, Rattus sp.
acaagctttttttttttgaaaacaactctggaatctttattactttcctttaaacagttgccagggccggagtcaacgataaatagaaggcacagtgttgcttggttttgtcatcagatttggggtttgttttctcgtgggaattttttgtccttttttcttttttctttttttttcttttttttttttacaaatacaaataaaacatgaaaaactctacctcaaaaaaatctaacagttcaacaaaagtcttta

SEQ ID NO: 651 - DNA, 255 bp, Rattus sp.
agaagggagccttcatgaagccctggaaagcccgttggtttgtcctggacaagaccaagcaccaggtgagtggtggtagagggacaagggaaacagaaggcaggcctgtcttgactctgcgcatctgtcttctcatcctcacccagctgcgttactatgaccaccgagtggacacagaatgcaagggtgtcattgacctggcagaggtggaagctgtggcacctggcacacccaccataggtgcccctaagactg

SEQ ID NO: 652 - DNA, 255 bp, Rattus sp.
acgcgatggtcagcgatgggtgtcatgtccctctttctgccttgtttatggtgttaccttccagccaagggttgccttaaattgtgccaggggtgttatgaccgagtgaacaggcctggatgtcgttgtaaaaactcaaatacagtttgctgcaaagttcccactgtccccccaaggaactttgaaaagccgacatagcgttattaatcaggaatactgcagtaatgaggattgttgccccacccccaccccctt

SEQ ID NO: 653 - DNA, 169 bp, Rattus sp.
tatacttgcccttgcgctccacgcagtctacagtcttcatattggaaaagtgcaattccttcagcttggctggtggctcaaggctggtgacggcggggccactaggttgggacggttcggctgtccccggcccgggctgttgctgctgctgttgctgctgctgatgttg

SEQ ID NO: 654 - DNA, 222 bp, Rattus sp.
  modified_base (9): a, t, c, g, other or unknown
  modified_base (12): a, t, c, g, other or unknown
  modified_base (19): a, t, c, g, other or unknown
actcttcancanaagcctntccaaggccattttggggactcactctggacactcctttggtgaccttacaggtccctcacctgctcagcttttccaggattcagggctgctctacatggcccaagagttgccagtgcctggcagagcccgggcgccaaggttgccagaggaagggggcagcagccgggcagaggactcttcagagggccatgaggaggaagt

SEQ ID NO: 655 - DNA, 255 bp, Rattus sp.
acaaacccagcctcaaaaggcaaaggatgacaaagcccaggaagcctcagtgtttgaatttgtttccgcaactccccctgtagttgtttctacgagggctaaaacagcttcaagaacatctgcaaaaaagcatcccaagaaatctgtagctaagatcaaccgggagggaaatttcaggccagaaacaagggatagtagatttgattccaaagaaaagctgaaggaagagaaggttgtctcctttagccaaacact

SEQ ID NO: 656 - DNA, 255 bp, Rattus sp.
  modified_base (12)..(13): a, t, c, g, other or unknown
  modified_base (16): a, t, c, g, other or unknown
  modified_base (28): a, t, c, g, other or unknown
  modified_base (30): a, t, c, g, other or unknown
  modified_base (33)..(34): a, t, c, g, other or unknown
  modified_base (41): a, t, c, g, other or unknown
  modified_base (52)..(53): a, t, c, g, other or unknown
  modified_base (60)..(61): a, t, c, g, other or unknown
  modified_base (72): a, t, c, g, other or unknown
  modified_base (83): a, t, c, g, other or unknown
  modified_base (85)..(86): a, t, c, g, other or unknown
  modified_base (90): a, t, c, g, other or unknown
  modified_base (96)..(97): a, t, c, g, other or unknown
  modified_base (100)..(101): a, t, c, g, other or unknown
  modified_base (106): a, t, c, g, other or unknown
  modified_base (110): a, t, c, g, other or unknown
  modified_base (112): a, t, c, g, other or unknown
  modified_base (114): a, t, c, g, other or unknown
  modified_base (121): a, t, c, g, other or unknown
  modified_base (129): a, t, c, g, other or unknown
  modified_base (135)..(136): a, t, c, g, other or unknown
  modified_base (142)..(143): a, t, c, g, other or unknown
  modified_base (146): a, t, c, g, other or unknown
  modified_base (148): a, t, c, g, other or unknown
  modified_base (150): a, t, c, g, other or unknown
  modified_base (153): a, t, c, g, other or unknown
  modified_base (155)..(156): a, t, c, g, other or unknown
  modified_base (160)..(161): a, t, c, g, other or unknown
  modified_base (164)..(167): a, t, c, g, other or unknown
  modified_base (169): a, t, c, g, other or unknown
  modified_base (171): a, t, c, g, other or unknown
  modified_base (175)..(176): a, t, c, g, other or unknown
  modified_base (199): a, t, c, g, other or unknown
  modified_base (202): a, t, c, g, other or unknown
  modified_base (207): a, t, c, g, other or unknown
  modified_base (224)..(226): a, t, c, g, other or unknown
  modified_base (232): a, t, c, g, other or unknown
actatgggggtnngangcatttaagggntncanntcttgantttccaattgnncaggttnncagtatttatncagattattancnnttgntaccgnnacnngattncctncnangtttatnatcgacgntgtccnngtggtnnttncnangcngnntttnngtnnnctntntggnncgactactacaggatccgaactntgntaccnctacctggagtgaacannnccatanctctaacctgtgttgaaatgcgg

SEQ ID NO: 657 - DNA, 255 bp, Rattus sp.
  modified_base (19): a, t, c, g, other or unknown
accctcagctagagcacanggcctctcgccctgcgtcttgaggacaagttcattgcttcccagcgctgcccttcagagctttccctcgcttgaccctgtgtcaggaagcccgtagctctgcttttcctcatttttagctcaggaaagatgtcaggctcaaaccacttctcaggttaatggaccctgtccgttgctctgtgcaactgctagcagtattttaagggagaagataaggcagggagagagtaggaggta

SEQ ID NO: 658 - DNA, 255 bp, Rattus sp.
acttgaaccggaagcactgcatacccccacgctcatgaccacaccctctctgactccttttactccgagtctggttttcacctwtcctagcacaccagagccttgttcctcagcccatcgaaagagtagcagcagcagtggtgacccctcctccgaccccctaggttctcccacactcctggctttgtgaggcacccagccacaccccttgcaggtgctacccgttgtcatctcctttccctgttcatccagcag

SEQ ID NO: 659 - DNA, 255 bp, Rattus sp.
acaaatttagccacctggccccccgggagcggcagacaatgttcgagctctcaaagatgttcctgctctgccttaactactggaagctggagacccctgctcaattccggcagcgatcccggtctgaggatgttgctacctataaggtcaattataccagatggctctgttactgccacgtgcctcagagctgcgacagcctcccccgatatgagaccacccatgtgtttggccgaagccttctgcggtccattt

SEQ ID NO: 660 - DNA, 255 bp, Rattus sp.
  modified_base (2): a, t, c, g, other or unknown
  modified_base (4)..(6): a, t, c, g, other or unknown
  modified_base (8): a, t, c, g, other or unknown
  modified_base (11): a, t, c, g, other or unknown
  modified_base (13): a, t, c, g, other or unknown
  modified_base (20): a, t, c, g, other or unknown
  modified_base (24): a, t, c, g, other or unknown
  modified_base (34)..(36): a, t, c, g, other or unknown
  modified_base (38): a, t, c, g, other or unknown
  modified_base (40): a, t, c, g, other or unknown
  modified_base (42)..(43): a, t, c, g, other or unknown
  modified_base (45): a, t, c, g, other or unknown
  modified_base (49): a, t, c, g, other or unknown
  modified_base (51)..(52): a, t, c, g, other or unknown
  modified_base (57): a, t, c, g, other or unknown
  modified_base (60): a, t, c, g, other or unknown
  modified_base (64): a, t, c, g, other or unknown
  modified_base (71): a, t, c, g, other or unknown
  modified_base (73): a, t, c, g, other or unknown
  modified_base (75): a, t, c, g, other or unknown
  modified_base (80): a, t, c, g, other or unknown
  modified_base (82)..(85): a, t, c, g, other or unknown
  modified_base (96): a, t, c, g, other or unknown
  modified_base (99): a, t, c, g, other or unknown
  modified_base (105)..(106): a, t, c, g, other or unknown
  modified_base (109): a, t, c, g, other or unknown
  modified_base (112): a, t, c, g, other or unknown
  modified_base (115): a, t, c, g, other or unknown
  modified_base (121): a, t, c, g, other or unknown
  modified_base (126): a, t, c, g, other or unknown
  modified_base (136)..(137): a, t, c, g, other or unknown
  modified_base (144): a, t, c, g, other or unknown
  modified_base (147): a, t, c, g, other or unknown
  modified_base (152): a, t, c, g, other or unknown
  modified_base (154): a, t, c, g, other or unknown
  modified_base (163): a, t, c, g, other or unknown
  modified_base (165): a, t, c, g, other or unknown
  modified_base (170): a, t, c, g, other or unknown
  modified_base (175): a, t, c, g, other or unknown
  modified_base (181): a, t, c, g, other or unknown
  modified_base (183)..(184): a, t, c, g, other or unknown
  modified_base (186): a, t, c, g, other or unknown
  modified_base (194)..(195): a, t, c, g, other or unknown
  modified_base (197): a, t, c, g, other or unknown
  modified_base (208): a, t, c, g, other or unknown
  modified_base (213)..(214): a, t, c, g, other or unknown
  modified_base (250): a, t, c, g, other or unknown
ancnnngnccngnccgacgnaccnctttacagannngncnannantatnanncacantgntacntactggngncnggctnannnnatcaggaaccncanggagcnnaanganaanaaggtntagangctacaaaannttacagngantggancnaaggctaangncaacntggangcctcnanncncttcatgnncntggacatatcngctanngacttgataaacatcgagagcttcttcagtcgagangtgtc

SEQ ID NO: 661 - DNA, 85 bp, Rattus sp.
tctgaatgttgttatatgccattctagtcctcattctcacagcttgttcaacccactcttgagggtttttttgacatcctgtggg

SEQ ID NO: 662 - DNA, 255 bp, Rattus sp.
acttgcgcacaaggccgagtgattcggagatgaaatatgccctgaagcgcctaatcactgggcttggggtgggccgagaagctgctaggccctgctacagtctggcgctagcacagctgttgcagtcttttgaagacatccagttgtgtgacatcctgggacagataccagaaaaataccatctacaagcaatgaacaagggcatggatgaaacctattttttttgcaaacctgtttgaaggcttggcccttttt

SEQ ID NO: 663 - DNA, 255 bp, Rattus sp.
  modified_base (11): a, t, c, g, other or unknown
  modified_base (16)..(17): a, t, c, g, other or unknown
  modified_base (32): a, t, c, g, other or unknown
  modified_base (115): a, t, c, g, other or unknown
acttgcgcttncgcgnntgcaggttgaaccangtgtaggcgaaggcacgcacatgcggcagcagagcctcgatgaatgggtggaactcatcctgcggagaggtggggaaactgangctcaggctgtcccacatagatggggaaaccaaagcctggatagacctcccactgatggagaggagggtcaggaaatgaaagccctggatagcttactaggacttccaaggagatgaccggggccaagctgaggacctta

SEQ ID NO: 664 - DNA, 255 bp, Rattus sp.
actttcagactagttggttatacagcttttcttcttagataagggttcttggtttttgtttgttttctctatatcattttgtgtttttgcattctgcaccattttacaaattaaaatgtgttttctggtttttttttttttttacaagctaagaacctagaatagagctgtctgccgcagcctcctaaaacaaaagtttacaattgttaaagccacagtatccttttaattgctaataatcaacctttctttccc

SEQ ID NO: 665 - DNA, 253 bp, Rattus sp.
  modified_base (31): a, t, c, g, other or unknown
  modified_base (35)..(36): a, t, c, g, other or unknown
  modified_base (42): a, t, c, g, other or unknown
  modified_base (69): a, t, c, g, other or unknown
  modified_base (71): a, t, c, g, other or unknown
  modified_base (82): a, t, c, g, other or unknown
  modified_base (93): a, t, c, g, other or unknown
  modified_base (97): a, t, c, g, other or unknown
  modified_base (112): a, t, c, g, other or unknown
  modified_base (116): a, t, c, g, other or unknown
  modified_base (119)..(120): a, t, c, g, other or unknown
  modified_base (122): a, t, c, g, other or unknown
  modified_base (135): a, t, c, g, other or unknown
  modified_base (137): a, t, c, g, other or unknown
  modified_base (145): a, t, c, g, other or unknown
  modified_base (149): a, t, c, g, other or unknown
  modified_base (151): a, t, c, g, other or unknown
  modified_base (154)..(155): a, t, c, g, other or unknown
  modified_base (159)..(160): a, t, c, g, other or unknown
  modified_base (174): a, t, c, g, other or unknown
  modified_base (177): a, t, c, g, other or unknown
  modified_base (197)..(198): a, t, c, g, other or unknown
  modified_base (208): a, t, c, g, other or unknown
  modified_base (210): a, t, c, g, other or unknown
  modified_base (250): a, t, c, g, other or unknown
acttaaagattcagggatctgaaagattaanagannaaacanacctggagtattatcaatagtcttcantntaaagtatganttggatgaatnaaanaattggttcttaaanggtntgnngnatgaaatctgtgncngtagtaanacantntcnnatgnntatactttttttgnttnatttctgaggtaagaatgtnngagacaaacntntggggcattagattctagtattaaaacaagtccaatgtgnacc

SEQ ID NO: 666 - DNA, 255 bp, Rattus sp.
  modified_base (6): a, t, c, g, other or unknown
acttanagagaacagccgccccatgggagagcagattcaggagcctgagtctgagcatggttctgaaccagactttttacacaatccccagatgcagatctcttggttaggccacgccgaagttagaagacttgaatctggaaggacacgaacaggaatgaactacatgaaagtgagagctggagtaaggcatgctgttcggggtctaatggaggaagatgctgagcccatctttgaagatgtgatgatgtcatc

SEQ ID NO: 667 - DNA, 255 bp, Rattus sp.
ttcggcttagcgtggtcgcggccgaggtacttctgcagggctttgtagtcctccacagatgtgacatccaacttgtgctttgtctttggtttaggtggttcaaatggacacgtgagaattgcaatcttagcattcaacacttctttcggcatctgtgggtgactgaagtccttatcaacgatcacaccctttataagtttggtgtcctccagccgcccacctactttgccttccactttgatgagttcaaagtca

SEQ ID NO: 668 - DNA, 243 bp, Rattus sp.
acacacgaactgcttctttataaattatgaactggagctcctgatcacggcggggccggggaggaccagtcctagggctttgctctctggaagaacacctttaggtaatttttaaaaactttagcatcaggctgctgaagtgcttgacagaactcctgaattatttctggagcgacttgcaaggagggcaggtattcttgctgaagatactgaacacattcggggccccgtttgagatgaatt

SEQ ID NO: 669 - DNA, 255 bp, Rattus sp.
ttcggcttagcggggtcgcggccgaggtacttcattgggatgttgaaagatgaatgggcttcgagtgaatgtggcagttaaacataccggcattttttggacttgcatatttagctggttggaacagagttgtttccttcctgaatttcaaagataagactgctgcagtcgcatcacaatattcagtggtgaaatcttgattgttactgtcattcccattcttttcgtttagaatcagaataaagttgtatttca

SEQ ID NO: 670 - DNA, 255 bp, Rattus sp.
actttgagatcttcgtcaaagagcagagcgaggtgggcagcatgggagcccttctcttctgagcctcgtgtgcctgtggaccagggtgagggcacaggctccagaactgccccggaagggtgctcttactgctggagcatgctactgtggcatagggactttaattttttttttttaatttcatatcttttcattccactgtgtaaagtgctaggaaatttccaatttgaagttttgctttttctgacattggca

SEQ ID NO: 671 - DNA, 127 bp, Rattus sp.
  modified_base (16): a, t, c, g, other or unknown
  modified_base (20)..(21): a, t, c, g, other or unknown
  modified_base (26): a, t, c, g, other or unknown
  modified_base (35): a, t, c, g, other or unknown
  modified_base (47): a, t, c, g, other or unknown
  modified_base (51): a, t, c, g, other or unknown
  modified_base (66): a, t, c, g, other or unknown
  modified_base (69): a, t, c, g, other or unknown
  modified_base (73): a, t, c, g, other or unknown
  modified_base (86): a, t, c, g, other or unknown
  modified_base (92)..(93): a, t, c, g, other or unknown
  modified_base (99): a, t, c, g, other or unknown
  modified_base (111): a, t, c, g, other or unknown
  modified_base (114): a, t, c, g, other or unknown
  modified_base (121): a, t, c, g, other or unknown
actctatgcctttgangtcnntactnacaagaggnccacaccccgantgcnaggaacagttcctgnggnccgngatggacattcancttgtnncctgancaagatcatatnccncaaaaangtacct

SEQ ID NO: 672 - DNA, 255 bp, Rattus sp.
acttggttgacaaggctcatcaagaagcggcctactgtgttgtcagcagacactttcccagacagcacatcctcagcatactgcaatacagtgcttagagcatcctggatccgggctgaggcccctcccacttgctgtaagtcacttgagagtccaatcacccggttggggctaaaacatgtcttcatgatgaggtcaactccaatgcgctcagtgtcataatacgcatacttcactgtgagaggggtgaacatc

SEQ ID NO: 673 - DNA, 255 bp, Rattus sp.
  modified_base (102): a, t, c, g, other or unknown
  modified_base (137): a, t, c, g, other or unknown
tgagcaccctgaaggtgaagggtctagttttgggcccaattcacaagaaccagaaggatgaagtcaatgaaaccgacttgaaacagattgatcccgatttangctcccaggaagattttaaagaccttctacaaagngccaagaaaaagagcattcacatcattttggacctcactcccaactataagggccagaatgcatggttcctccctcctcaggctgacattgtagccaccaaaatgaaggaggctctga

SEQ ID NO: 674 - DNA, 255 bp, Rattus sp.
actgggataaagaagttctgcgagccaagaaggacagctcggaagccttccttaacgaaggcaatcgtgaagtgttactggaaatcttacctgattttgggaatttttacgttaattgaggagaccacccgagtagttcagcccatatttttagggaaaattattgattattttgagaagtatgactctgacgactcggccgctttgcacacagcttacggctacgcggcggtgctgtcgctgtgcacgctcatc

SEQ ID NO: 675 - DNA, 124 bp, Rattus sp.
tcattgccatatacagaagcacagtcaatgtggcggtagcctacgctaagggcatatttaatagctactttcacctgaccaggctcactcttccatgtccccagaccaatcagaggcatcttct

SEQ ID NO: 676 - DNA, 255 bp, Rattus sp.
acttgcccagaatgtcgggaccacccacgatctgctggacatttgtctgaagagggccacagtccagggtgctcagcatgtgttccagcacgttgtgcctcaggaaggcaagccagtcaccaaccagaagagctctggacgatgctggatcttttcttgtttgaatgttatgagacttccattcatgaaaaaatttaacattgaagaatttgagtttagtcagtcttacctgtttttttgggacaaggtcgaacg

SEQ ID NO: 677 - DNA, 255 bp, Rattus sp.
  modified_base (255): a, t, c, g, other or unknown
acatggctggaattgatggggagaaggaacacgctaatgccctgaagatcctgctggagatgggcgagttcttccagatccaggacgactaccttgatctctttggagaccccagtgtgaccggaaaggtcggcactgacatccaggacaacaaatgcagctggctggtggttcaagtgtctgctacgagccactcctcagcaagcgccagatcttagaggagaattatgggcagaaaggacccacaaaaagtgn

SEQ ID NO: 678 - DNA, 255 bp, Rattus sp.
  modified_base (97): a, t, c, g, other or unknown
  modified_base (199): a, t, c, g, other or unknown
acttcatatatttaaacttggaatgaggccaaagcaagaaaaacacaaagaacacaggctgttaattaaaaaaaaaatcaagaatgctaactagtgnaaatattatcacatgaaaaccaaccccggattaacaaaacaaccttatgattagacacttaagacctcgattttttgcttaactagaaatttacaccaccanaagttcctgattaaaatacagaaatctataaagctggcgcaggacgtaaacttgat

SEQ ID NO: 679 - DNA, 127 bp, Rattus sp.
acaatcagagttcgtagaagtaatgaacgaaatctgggccaacgaccaaatcaggagcgccgtccttatttcgtcaaagcctggctgctttgttgcaggtgctgacatcaacatgctggcctcttgt

SEQ ID NO: 680 - DNA, 205 bp, Rattus sp.
  modified_base (199): a, t, c, g, other or unknown
acaaagtggtggaacttttcttctatctcacgatgggattttctccagccttggtggtgacatcaatgaataacactgacggacttcaagagcttgcctgtgggggcctgatctactgcctgggagtcgtgttcctcaagagcgatggcatcattccattcgcccatgccatctggcacctgttcgtggccacagccgncgccgt

SEQ ID NO: 681 - DNA, 255 bp, Rattus sp.
tttttttttttttttttttttttttttttttaaaaagaaatttttgcctttattagaatggcattaggccttaaatatgccaattttggtaatcacattattgttttaataagaaacgactctacagaattgcaatactggtccaacagtcttgtctttcttttaaagcaagaaacagaatgtaagtaaccagaaagcagggcaggcatcagctaacccaggagactagcttcttagatccaagcgtttgcagag

SEQ ID NO: 682 - DNA, 166 bp, Rattus sp.
  modified_base (17): a, t, c, g, other or unknown
  modified_base (51): a, t, c, g, other or unknown
  modified_base (107): a, t, c, g, other or unknown
  modified_base (113): a, t, c, g, other or unknown
  modified_base (115): a, t, c, g, other or unknown
  modified_base (132): a, t, c, g, other or unknown
  modified_base (134): a, t, c, g, other or unknown
  modified_base (144): a, t, c, g, other or unknown
  modified_base (155): a, t, c, g, other or unknown
  modified_base (165)..(166): a, t, c, g, other or unknown
acctctttccagatggngtgctcttgatggtggatgagatcttggagcctnctttctgttcccacagacttttcttgctcatgtctccagctactatatcctggcangagggngncttggaagcatactgantntgcacctatnctgtctcccanagagtcttgnn

SEQ ID NO: 683 - DNA, 255 bp, Rattus sp.
  modified_base (33): a, t, c, g, other or unknown
actggttacacactctctttatagactcccttntgctggaaaatttccacatgcttttgagagattccccaaagggtgacgctatttatctttagtaagctatttatctttgtttttgaaatatcaaaccctggaggtccttttttcagtatgactttttttattttgttttttttttattttgttttttaggttactttgtcagaagcataacagggtataagttgattcataataaatacctgtccatcttca

SEQ ID NO: 684 - DNA, 255 bp, Rattus sp.
acatctttagttttacaatgcagattaacagaatacaggaattccagcatcaaccaagtttttttttacatctttcttgcagttacagatactatttaacaagattccaatttctaagaaaaacttagtcacaatgctatttgatcttcctctaggtctcaaggctgaaaatgttctcaattcgcttttaacaataacaaggctcttattctgaaatacagcaataccagcctatacccaacagtgatcctacaa

SEQ ID NO: 685 - DNA, 255 bp, Rattus sp.
  modified_base (127): a, t, c, g, other or unknown
  modified_base (138): a, t, c, g, other or unknown
  modified_base (148): a, t, c, g, other or unknown
  modified_base (150): a, t, c, g, other or unknown
  modified_base (210): a, t, c, g, other or unknown
  modified_base (228): a, t, c, g, other or unknown
  modified_base (251): a, t, c, g, other or unknown
acgaatttggtcccagatggtgaccatccatgcatacatagcagccactgtgaggtgtgctgtggcctgaggcctggtctttctgactttggggactgccacatctgggctttctcctctatgattntttgggtttgnttttgtagcngntcatttgggtcaagtttacactaccgagatgattattttttgacaaaacagggtagcacnagagcaggagatggttgnggccggacagtccggctctgagnggga

SEQ ID NO: 686 - DNA, 255 bp, Rattus sp.
  modified_base (11): a, t, c, g, other or unknown
  modified_base (14)..(15): a, t, c, g, other or unknown
  modified_base (94): a, t, c, g, other or unknown
  modified_base (113): a, t, c, g, other or unknown
  modified_base (117): a, t, c, g, other or unknown
  modified_base (127): a, t, c, g, other or unknown
  modified_base (151): a, t, c, g, other or unknown
  modified_base (165): a, t, c, g, other or unknown
  modified_base (177): a, t, c, g, other or unknown
  modified_base (188): a, t, c, g, other or unknown
  modified_base (198): a, t, c, g, other or unknown
  modified_base (223): a, t, c, g, other or unknown
  modified_base (231): a, t, c, g, other or unknown
  modified_base (241): a, t, c, g, other or unknown
  modified_base (254): a, t, c, g, other or unknown
acaagcttttnttnnttttttttttttttttttccaggttttaaaactttatttgcatattaaaaaaattgggcattccaataattaaaatcgnttgaacaaaaaaaaatggnactntgattaaacngcattttatatcctgcaagacatntttattttactctnaattccaccatntcccacccagntttttccttnaccaacatgcaagttcttttccctntctgccanccaggccagnaggtgggcggcana

SEQ ID NO: 687 - DNA, 255 bp, Rattus sp.
acaattttgattttccacattgtggccttttaaacacctaaaatatttaataaaaagagaatttctccatctctgtgtcctctatcagtgtgcacagtctcgagtaatgacccaacataaaaattaagccaaatgtaaagccagccacactgtcctcagaacagtggttatccccttcctttagtgcctgacatcttcttagtgtttgtgagaaaataggtttaaatctgaatattcacagtgaaaagctgaaat

SEQ ID NO: 688 - DNA, 255 bp, Rattus sp.
acgtcttcttttggtcctttaaagaaatggctgcatcgatcttctggacggtttcagggaggcccagagtgtgaatgcttttaggataacctgctagctcttcatgacctcggatagcccagatctgatttcctttaagaatgaaaacagtgtctctgttagtaacttcatatgcagcatccatgttggatggaagagacggccaaaatgaagagatcaaataaaagccaggctcaggggtcctgagagattttc

SEQ ID NO: 689 - DNA, 241 bp, Rattus sp.
  modified_base (25): a, t, c, g, other or unknown
  modified_base (215): a, t, c, g, other or unknown
actaatctcttcagcatgtgccatnccccagcctgctccacacaccctccttctccctagctctaagctcatcagttctgagttcacctgagctcctttatttcaaatgcagtccaggtgagatggcaaatcaagtttgtcagaacaaatttaccaccaccttcccaagggaatttcataactcagaatactcacaggaacctagacatgcatgnttaaatattatttaatgaccgactgt

SEQ ID NO: 690 - DNA, 255 bp, Rattus sp.
  modified_base (24): a, t, c, g, other or unknown
  modified_base (35): a, t, c, g, other or unknown
  modified_base (43): a, t, c, g, other or unknown
  modified_base (46): a, t, c, g, other or unknown
  modified_base (60): a, t, c, g, other or unknown
  modified_base (63): a, t, c, g, other or unknown
  modified_base (91): a, t, c, g, other or unknown
  modified_base (105): a, t, c, g, other or unknown
  modified_base (108): a, t, c, g, other or unknown
  modified_base (116): a, t, c, g, other or unknown
  modified_base (119): a, t, c, g, other or unknown
  modified_base (124): a, t, c, g, other or unknown
  modified_base (127): a, t, c, g, other or unknown
  modified_base (132): a, t, c, g, other or unknown
  modified_base (136): a, t, c, g, other or unknown
  modified_base (140): a, t, c, g, other or unknown
  modified_base (150): a, t, c, g, other or unknown
  modified_base (182): a, t, c, g, other or unknown
  modified_base (200): a, t, c, g, other or unknown
  modified_base (205): a, t, c, g, other or unknown
  modified_base (213): a, t, c, g, other or unknown
  modified_base (216): a, t, c, g, other or unknown
  modified_base (224): a, t, c, g, other or unknown
  modified_base (234): a, t, c, g, other or unknown
  modified_base (239): a, t, c, g, other or unknown
  modified_base (241): a, t, c, g, other or unknown
  modified_base (252): a, t, c, g, other or unknown
cggactaagtagctggcgaagcanctacatgcacntgaccagnacncttctaagtgccanganctgtctcccaaataggtgaaggagatgnaacagttcgtgaanaantatgatancgnagctntgngcgtntgcnacgngaaccttgcnttcgagatgaatgcttaaggtgacaaggagcncaaccctgccggagacanaaacnccccagcnacngtgggttncaaggacaantctgnanaagccaagaanacc

SEQ ID NO: 691 - DNA, 252 bp, Rattus sp.
acaagtttaaggcatcaaaatgactaattatagacgataataacagtctggatcctaggaggcaactggaggcgttttaattggaaataagcatttgagataatgttaatagcagtgcagaaaaatgaagttaaaaacaaaatcagtgttaagaagccttccgtcctgcaccttgcttttaatcatctcctccacagagaatgagcagaaccttcctgtagtctccagaagtgtcgcccttgataaaagagt

SEQ ID NO: 692 - DNA, 242 bp, Rattus sp.
  modified_base (50): a, t, c, g, other or unknown
  modified_base (69): a, t, c, g, other or unknown
  modified_base (121): a, t, c, g, other or unknown
  modified_base (209): a, t, c, g, other or unknown
  modified_base (228): a, t, c, g, other or unknown
  modified_base (230): a, t, c, g, other or unknown
accagcgcctagggggtagactatgaggagcgagtgctgccgtccattgntaatgaggtgctcaagagngtggtggccaagttcaacgcctcgcagctcattacccagcgggctcaggtgnctctgttgatccgaagagagctgacagagcgtgccaaggacttcagcctcatactggacgatgtagctatcacagagctaagcttcanccgagagtacctgcccggncnggccgctcgaaa

SEQ ID NO: 693 - DNA, 255 bp, Rattus sp.
cggcgatatgtgcgcaagtttgtgttgatgcgggccaatatccaggctgtgtccctcaagatacaaactctaaaatccaacaactcaatggcacaagccatgaagggtgttactaaggccatgggcaccatgaacagacagctgaaattaccccagatccagaagatcatgatggagtttgaacggcaggcagagatcatggacatgaaggaagaaatgatgaatgatgccattgatgatgcaatgggtgatgag

SEQ ID NO: 694 - DNA, 255 bp, Rattus sp.
accttacagatgacgagacttctgctcaggtttccttgactgaagggcataagtttgaccgggatgtggaactcctgatttactaccgtgaagtgcacagccccagtgtagctgtggagaagggaatgcaggacaagaagcgagatagtttgatgggagctccttgtgcaatggtgagcttctacccagacatcccagaagtgaacgcctcaaaggtctgtggagaatttgtgtttctaatggaccgctcaggaa

SEQ ID NO: 695 - DNA, 183 bp, Rattus sp.
ttcggctttcgagcggccgcccgggcaggtacacctcgttggtgtgaaggaaaagagagatcctgtccggcgggtaaaccaggagcagtaggcgctgcaggaaccgaggtaggaagggagtgggctgctccacaaacacgggcagaagcacccgggggggaggctgaccccccgggagaggcc

SEQ ID NO: 696 - DNA, 183 bp, Rattus sp.
  modified_base (60): a, t, c, g, other or unknown
  modified_base (67): a, t, c, g, other or unknown
  modified_base (174): a, t, c, g, other or unknown
  modified_base (181): a, t, c, g, other or unknown
accatgttgcatgtggcttcctctggatatatctaagcccttctgcacatctacacttanatggagntggtcaaagggaacatctgggttatgccttttttacagtagctttaggaaccgtcggcatgttgctgttgaagtgtggagttgtgagccgtggactgtggacagtcnacagcgngt

SEQ ID NO: 697 - DNA, 255 bp, Rattus sp.
  modified_base (144): a, t, c, g, other or unknown
  modified_base (172): a, t, c, g, other or unknown
acaaaccgtagaacttcactcagcagagagataaaggcgtaacacaaccgcccacccaaggtaatggtggacagcaaggctggaatcctcatcctgcaagcaagaagagggggactgcaaagtggagtttgtgggtaaccttantctctccttgctactgaattcataaagnaagaggcctttacaaataacccacaccctttaattttctactacataataggattataaggccacagaattcctttggggaaa

SEQ ID NO: 698 - DNA, 245 bp, Rattus sp.
  modified_base (6): a, t, c, g, other or unknown
  modified_base (189): a, t, c, g, other or unknown
tacttncagacaaacccatacttcacaaacatggtgatcgtcaaggagttccagcgcaaccgctcaggtcggttggtgtctcattctaccccaatacgttggcatcggggacaggaaccccaggtctgcaatcgcaggagccacgacaccagagaaagcttcttcaactggttttccaaccacagcctnccagaagctgacagaattgctgagattatcaagaatgacctgtgggttaacccagt

SEQ ID NO: 699 - DNA, 166 bp, Rattus sp.
acagcgcccggcagagacggcgcctgaaccgaggcctgcggaggaagcagcactcactgctcaagcgcttgaggaaggccaagaaggaggcgccacccatggagaagccggaggtcgtgaagacccaccttagggacatgatcattctgcccgagatggtcggcag

SEQ ID NO: 700 - DNA, 194 bp, Rattus sp.
  modified_base (75): a, t, c, g, other or unknown
  modified_base (108): a, t, c, g, other or unknown
  modified_base (110): a, t, c, g, other or unknown
  modified_base (147): a, t, c, g, other or unknown
  modified_base (190): a, t, c, g, other or unknown
aaaaaaaaaaaaaaaaaaaaaaaaaaagcttgtacacggccaggtgtccttcctcgatcttgtggatggaggccntaaaggaggatccgccaccaaccccaccactgnanccaccaaaagccgggcttgagtcatattcatccttgntcctccggtcagtgacgcatcgcccccgcccgcacgtgcaagnccgc

SEQ ID NO: 701 - DNA, 239 bp, Rattus sp.
acggccgcaaatacatccagacagacagcggcccctactgtgttccctgctacgacaacaccttcgccaacacctgtgccgagtgccagcagctcatcggccgcgattcaagggaactgttttatgaggatcgccacttccacgagggctgcttccgctgctgccgctgccagcgctccctcgccgatgagcccttcacctgtcaggacagtgagcttctctgtaatgagtgctactgt

SEQ ID NO: 702 - DNA, 255 bp, Rattus sp.
ttcggctttcgagcggccgcccgggcaggtacgcttccattatgccatcattgggtttttgaaaatgagtgacaccctagccgtttatatctttgaagaaaaccacgtggttcaagagaagatctggtctgtgctcgagtccccaaggggtgtttggatgcaagcagaagtcagctttaagaagcccatgcccacgaaggtggtctttatgagcctatgcaaaagcttttgggactgtggactggtagccctgga

SEQ ID NO: 703 - DNA, 255 bp, Rattus sp.
aggtacagagccaggcaggactctgagcctctggaattagggaggtcctggtgcagaatctgaacaggcagagcagacagcagggcagaagcggcctttgaagaatgatgagctgtgaccccgcgcctccgctccacttgcctccagccccttctcctaccacctctatttattatacatcagggttggagtggggttggtgtccttaggggctcaagttccttctctcagctgggacaggagatggctgctcaa

SEQ ID NO: 704 - DNA, 255 bp, Rattus sp.
agaggctcagaatcgatcctataaatgaaagatcctttatatgcaattataaagaacactggtttacagttagaaaattaggaaaacagtggtttaacttgaattctttgttgactggtccagagctaatatcagatacatacctcgcactgttcttggctcagttacagcaagaaggttattctatatttgttgttaagggtgatctgccagattgtgaagctgaccaacttttacagatgatcaaggtccaac

SEQ ID NO: 705 - DNA, 255 bp, Rattus sp.
taggatgcagaaacggtaggtcgggagaacactggaggctcctcgccaaatatcacaatcatgatctgaataagttccagcaactctgaccgtgggtgtttccagtcatgtaggtaaggcaggtagattttcccatttgcatccacatgctttcctgttttaatagtcattgaactagtaggcttaacaaaacagataggggggttatatgggtatgtgtccaggagccacaggcatattggaatgttatatata

SEQ ID NO: 706 - DNA, 255 bp, Rattus sp.
  modified_base (150): a, t, c, g, other or unknown
acacacacagagggagacagagactcaggaaggatggggctcgggcacacttgctgctggtgtccactcctccccttgcctgctgtctgtttcccacaggagatcttggttctagcgtgaataaagcagggtggacctgccccttccctnccgacttccttccacactgggttggaaagggctatcatgcccaagtcggacggaccaaggtggcagatgggtaggggctgaagagtgggtgcacaaatgctcaca

SEQ ID NO: 707 - DNA, 255 bp, Rattus sp.
cttcatcctgcgctgtggcaaagctctgaatgagcgcaaagctgaagtgagacttcagttccgcgatgtggcaggtgacatcttccaccagcagtgcaagcgtaacgagctggtcatccgtgtgcagcccaatgaggcggtatacaccaagatgatgaccaagaagcctggcatgttcttcaaccctgaggagtctgagctggacctaacctatggcaacagatacaagaatgtgaagctccctgatgcctatga

SEQ ID NO: 708 - DNA, 107 bp, Rattus sp.
acctgtgccctgttaaactcttccaaaacatgatggtcccatcagttccacaggtcataacccatgcatgaggtgcccccttggccttcgtcccaacacagacaaag

SEQ ID NO: 709 - DNA, 163 bp, Rattus sp.
  modified_base (18): a, t, c, g, other or unknown
accaagacccagtctganataggtggataagggttatgctttattgatctacatagagagtttacgaaatatgcgtgtgcttgcgtgtgcacataaatagtattagaggcgggaatgaagggcctggattttaaaaaaagaaaaaaataaagagagcagaatt

SEQ ID NO: 710 - DNA, 255 bp, Rattus sp.
  modified_base (138): a, t, c, g, other or unknown
acctccaaaagaaccatgaggagggaaatgggagatctgcaaaatgcatcaggggggaacatcaatgtggagatgaacgcggccccgggcctggatctaaccgccatgttgaacaacatgagggccgaatatgaaganttggctgagcagaaccggaaagatgcagaggccagttttaaagagaagagtgcatcgctgcagcaacagatttcagacgacgcaggagcaatcacggcggccagaaacgagctgatg

SEQ ID NO: 711 - DNA, 255 bp, Rattus sp.
accagatcttaccggaggtctcgaggagccagagaagcaaagagtcacagggaagcagaatgatttgtcagaccagagcaggtgtcagacctctgaggaaggaaacaaggggctccctgggaggcctgtgccgagacgggctgttccaggacaccggccaatggtccgcagacacacagtcaatgacgcagccatacttcaggtcccagaggtgactggccacctgaccacccaagaggctggtgtttctcggtc

SEQ ID NO: 712 - DNA, 255 bp, Rattus sp.
  modified_base (141): a, t, c, g, other or unknown
  modified_base (190): a, t, c, g, other or unknown
acttcgaagtgctgggcaccacctcgtgcgggcgaaggagaaccttgtggataagatctggacagaccggccagagcgcccttgcaagcccctcctcacactgggtctggattatacaggcatctcgtggaaggaggaggntgcagaccttcggatgaaaatggcggagaggagcatcgtgtggggttgnggcactggcctaagaccgagaatgcatggctggtcaaactccgaggggcaagaatgtggagcaca

SEQ ID NO: 713 - DNA, 255 bp, Rattus sp.
acaagaggctaggccacttgtgccgacagccgttccgtgcatgcttctgcctttgctgaacctttctgggtcaccataaaagagctcaaggcaaaactgtcacagggaaagaaggtgatttgggaaagaagctttgtgcttggttatctctttaaaccaccacttggaacaaatgggcgcctgtggcctgggtcctaaacctggcttacaaacctttgaagttccagtcaccattgagcttgactgtgacaatat

SEQ ID NO: 714 - DNA, 255 bp, Rattus sp.
ttcggcttagcgtggtcgcggccgaggtacgagacccccagacccctatactgcagaccaaataccgtgcaagggctgtgacctgcaaaagtgcggcagagaaggaggccgaggaacttgagaaactgcaacaatacaaattcaaagcacgggaacttgatcccagaatttttgaaagtggccccatcttgcccaagagaccacctgttaagcctcctacccagcctgttggttttgatttggaaattgagaaac

SEQ ID NO: 715 - DNA, 255 bp, Rattus sp.
  modified_base (202): a, t, c, g, other or unknown
  modified_base (210): a, t, c, g, other or unknown
  modified_base (254): a, t, c, g, other or unknown
acaagctttttttttttttttttttttttttttttttttttttttttttttttttttttttttttttaaaggttcaaaaaaatatttatttataaaaaaaacaatggaaaaaatttatgctgaaaaatgcagcaataaatacagttaaagggaacagggactttacagtaaaacattggcacaaatgaaatttgaaggcacnccacccanacctacatgtctggggccatttttgtaaacccccctttaaagcnc

SEQ ID NO: 716 - DNA, 255 bp, Rattus sp.
  modified_base (15): a, t, c, g, other or unknown
  modified_base (26): a, t, c, g, other or unknown
  modified_base (43): a, t, c, g, other or unknown
actgcatgctgatgnccaccgggggncaccggacactccttgnaggagctaggctcctcagatcagtgccagaggctgctcagagaggtaagagcagggcagcaagcttcctacggcatccacgatggcttccaggtgctcatcttgtgcctgaggcccacagagctgcatgaagtctggcaaacgcaacaaggattcaagggtgtggccagagaagcctcggcaagcaaggatctgtgtggcaatgacctcttc

SEQ ID NO: 717 - DNA, 255 bp, Rattus sp.
  modified_base (13): a, t, c, g, other or unknown
  modified_base (39): a, t, c, g, other or unknown
accagagacttgntctgtatctgtgggttctaaccctgnttcccctactcctgagccatctgcaagcaaacttatggtttcaactcactctgaacaggtgtcatctcatgagatgccacttccagttagacttccccctcctacattgcagtctatggctcctgctgggcccaccccttctacagtgcccacgccattgcctttccctccgagcttacctcctctgcttcctcttcctgcaagtggtcctggtgt

SEQ ID NO: 718 - DNA, 255 bp, Rattus sp.
ggcttgcgtggctagttcatgtgggagagtccttgtatgccttggtattgtgcaggcgtacaggaatcacagacagccaggcccagctcctctggttcctacagacttttctgtttggtgtagcctctctctccatcctgtttgcttacagaccaaagcaccaaaaacataattaaaggagaaagcggggtttcctttccacttcttcaagccctccttcagtgggtcctggtttccaggatgatctctctgtct

SEQ ID NO: 719 - DNA, 197 bp, Rattus sp.
acatggcaaaacctcaactggggaaacacctcatacggtcagtctgtagacaaggctgtggggaattgtcttaatgactgagagaagaactcagtctgatgtgggtggcactacctctagataggctgaaaacaggctgagtgagacagtcagcaacactggttttgcttcagttccttctctggttcctgccttaa

SEQ ID NO: 720 - DNA, 255 bp, Rattus sp.
  modified_base (127): a, t, c, g, other or unknown
acagctaccctgcagacacctcctggcctgcggcggagcaaggttcatcaagaccgacctctcctgagaagtttacagtgcctcacgtctgtgccaggtttggtcctggtgggcagctcctcaaagngatacccaacctgccttcagaaggacagcccgcattgggtggagatccacagccttagagaccttgctgcaagcacacacctgagcaggaagaaatgcgctccttcccaggacctctcggcaaagatg

SEQ ID NO: 721 - DNA, 255 bp, Rattus sp.
acaagcttttttttttttttttttcttttttttctacggtagggctgctggctcggttacatgctcatgtgttccgggagaacataggaaatgtcgtcccaggggtgacgatacagcccttgcttcagcctcttctggtcaagatagtgcccgatgaagcccatactccttcccagcacaaagacgccattgagggctccaatgtcaacatacccgccagcttcctcccgggtgaaggagccacagttcctaagc

SEQ ID NO: 722 - DNA, 255 bp, Rattus sp.
ttcggcttagcgtggtcgcggccgaggtaccctgtatttatatattagaaaagtagaatccaccaaatgacaagatggaacagaaacagagtaaaaatatatcagctggtttatttttagaggtatatgttaactaaacacttttcaaactaaagctcattctttaaggaccctctggagaccatatgaatgtttgtgtatgggtgtgtatatatttacttatatcctgaattctacttaattttggctctctta

SEQ ID NO: 723 - DNA, 81 bp, Rattus sp.
cgcatataaacgcagacttgaacccacatttgcccaaatccacatttattcgaacctaacagccgaattacagcttgaggt

SEQ ID NO: 724 - DNA, 149 bp, Rattus sp.
  modified_base (1)..(2): a, t, c, g, other or unknown
  modified_base (10): a, t, c, g, other or unknown
nncaaatcanacccacagcagactacctaggttacctggaaagaactaagtttctatagtaataaccaataagaaatgaagaccaaccacccatctataaaacctcaccttatcctttgaatccaaatctgacagcatggaagatcaga

SEQ ID NO: 725 - DNA, 255 bp, Rattus sp.
acgctgatggagattccatgcaccataaagcagttcagcgcggagaaacagtctcccagggaccgaatcgacaaagaagaaatgggaaacggaaagaaaactggggcatttccttttcctcgttgttttaatctggacaaaagcctaactcctggcatcaggatgctactgtgactcaagagagaagctagaactgcactagtcacgaaggtcaagttcaacctctaggaggatggagaacactcttcctgtggc

SEQ ID NO: 726 - DNA, 255 bp, Rattus sp.
  modified_base (221): a, t, c, g, other or unknown
ggataacagcttcttctacttgaggacacctgcaaccaagaggatctctggcatccaaaacttctaacacaatgtctgaggcttcaatcacctttttaagttcctgacaatgtaacttctttggattctgtttgcctgatttagctttctttattttgggctcatcagattcctcctgagtttccacattagattgctcatcatcagggctaatttcaagntttctttttcgttcttggtctttttgcctgtcaa

SEQ ID NO: 727 - DNA, 255 bp, Rattus sp.
atccagtgcccatggatgcgggtttttggttttgttcaggctgtgagaagttacacgctggtcagctgacttttcttttctgagagaatcacctctcaaatgctttcctgtgctccctgagggcctcctggctggttgcaggtttctgttttactggtgttctgggctggctggtgtcctgttatcacttgatagaaagaatagaaaatgtttctactcttaccctgctagcgttgagtagtgttaaatcctata

SEQ ID NO: 728 - DNA, 255 bp, Rattus sp.
atccgcctaaccggggccccgcccaaggaaaagaaccggaaaccgggaaaatcctgcaacaaagccaacaacaaaaaaggaaggaaggggccgggcagtgccaagactgatggctgtcagggcaagtgcaattctagactgagcatggttttctggaacagatgatcttggatgatcaggaatccgaggacctggaccgtccatcattgagccaccagtttgctggagcacagacatgggtgttctagcacttcc

SEQ ID NO: 729 - DNA, 255 bp, Rattus sp.
  modified_base (231): a, t, c, g, other or unknown
acctcagagaacccaggccagggcagatcactgagtgcaccttcctgcctaggcagggctgctctcggacctagtcagcttatctgatgtcaggttgtggccatagcctttgtgaacttcttgaccccagagctatttgctgaggtttgtatgagaagtgtgtggacaacaacctcaggtttatcagatgtatttagtagtagggcaagaggatctcatctcgatttctgntccccttttcttagttccatacat

SEQ ID NO: 730 - DNA, 255 bp, Rattus sp.
ttcggctttcgagcggccgcccgggcaggtactccttagagccagttgctgcagaactcaaatctctgctgggcaaggatgttctgttcttgaaggattgtgtgggctcagaagtagagaatgcctgtgccaacccagcggctgggactgtcatcctcctggagaaccccccccttcaaggaaaagaaaaaaggaagggaaaagatgcttctgggaacaaggttaaagctgagccagctaaaattgatgctttcc

SEQ ID NO: 731 - DNA, 255 bp, Rattus sp.
  modified_base (4): a, t, c, g, other or unknown
  modified_base (13): a, t, c, g, other or unknown
  modified_base (16): a, t, c, g, other or unknown
  modified_base (25): a, t, c, g, other or unknown
  modified_base (27): a, t, c, g, other or unknown
  modified_base (48): a, t, c, g, other or unknown
  modified_base (61): a, t, c, g, other or unknown
  modified_base (65): a, t, c, g, other or unknown
  modified_base (70): a, t, c, g, other or unknown
  modified_base (85): a, t, c, g, other or unknown
  modified_base (89): a, t, c, g, other or unknown
  modified_base (94): a, t, c, g, other or unknown
  modified_base (98): a, t, c, g, other or unknown
  modified_base (103): a, t, c, g, other or unknown
  modified_base (106): a, t, c, g, other or unknown
  modified_base (111): a, t, c, g, other or unknown
  modified_base (116)..(118): a, t, c, g, other or unknown
  modified_base (130): a, t, c, g, other or unknown
  modified_base (135): a, t, c, g, other or unknown
  modified_base (138): a, t, c, g, other or unknown
  modified_base (142)..(144): a, t, c, g, other or unknown
  modified_base (147): a, t, c, g, other or unknown
  modified_base (150): a, t, c, g, other or unknown
  modified_base (156): a, t, c, g, other or unknown
  modified_base (161): a, t, c, g, other or unknown
  modified_base (165)..(168): a, t, c, g, other or unknown
  modified_base (178): a, t, c, g, other or unknown
  modified_base (184): a, t, c, g, other or unknown
  modified_base (186)..(187): a, t, c, g, other or unknown
  modified_base (192)..(194): a, t, c, g, other or unknown
  modified_base (199): a, t, c, g, other or unknown
  modified_base (208): a, t, c, g, other or unknown
  modified_base (217)..(218): a, t, c, g, other or unknown
  modified_base (221): a, t, c, g, other or unknown
  modified_base (223): a, t, c, g, other or unknown
  modified_base (225)..(226): a, t, c, g, other or unknown
  modified_base (229): a, t, c, g, other or unknown
  modified_base (231): a, t, c, g, other or unknown
  modified_base (236)..(237): a, t, c, g, other or unknown
  modified_base (240): a, t, c, g, other or unknown
  modified_base (242): a, t, c, g, other or unknown
  modified_base (247): a, t, c, g, other or unknown
  modified_base (250): a, t, c, g, other or unknown
  modified_base (253)..(255): a, t, c, g, other or unknown
accntggccatcnacntccaggaancngtgggggaagaacgagagggnccacaccaacccngganccttncggaagcacactcancagncaggnctcnccganacnggagnggccnnnagacccaacaanaaganggngcannnggnggncaaacngcctngggnnnngggaggaaangaagcngnnccaannngaggncacaagggngcggaaagnnccngncnngangnaaaannagngncctgncanaannn

SEQ ID NO: 732 - DNA, 255 bp, Rattus sp.
ttcggcttagcgtggtcgcggccgaggtacatttataaaagaacgtctggtccttttacaaaaatctctcatttaatttaaatacagttcatatttacagattaaacatgaaatatctatggtcaccaagcatattgcacatcacagagagagagagaaacatttgtgcatctcagtaagtttgcccagagtgtccaactctagactttttattttgtagaaacacatttactttttgtgcgtgtaataaataaa

SEQ ID NO: 733 - DNA, 255 bp, Rattus sp.
acaagcaaggacgtccacgagtatccagcctcttaacaggactcttccccagccccagtgggcagaacagatctgaacaggaaacttatgccagctgctccaagtcctcaggtagaaggaagaaggactgtatctggactggactgagacacaagtggaagagccccgactatctcccagagactatgaacctggagaacgtgaagctgttgtggcccatgggacacctgtaggagcagaaatgtgactttggat

SEQ ID NO: 734 - DNA, 255 bp, Rattus sp.
  modified_base (93): a, t, c, g, other or unknown
  modified_base (208): a, t, c, g, other or unknown
  modified_base (216): a, t, c, g, other or unknown
gagtttctttatgcttgggtaaaactgcgttataaatttaacaatacaaaaatggcttagaaacgagaggaggaatgataaagtataacctgnccagcttgcacacagactggcaagcaaatgacacaatgaggacaatcagcgaggggcacatgaacctcaggaagaatcgtggaccacaggaccttctccatggctttactctggntcataggnaatcagaagaccctgccttgatacatctcatgggtctgg

SEQ ID NO: 735 - DNA, 255 bp, Rattus sp.
ttacaagaacagcaaacctgactctttactgagaatggaggaggagcagaggttggagaagtcacccctggctgggaacaaggacaagttttccttttctttctctaacagaaaactcctgggctccaagcccctcaggccggcgagcagccctggcgtgttcgggaccttgcagagcttcaaggaggacaaggccaagcccgttcgagatgagtatgaatacgtatcgaacgacggggaagctgaaaattgacg

SEQ ID NO: 736 - DNA, 255 bp, Rattus sp.
atcgaagtgcccagtagggggatgagggcactcccctgtgctggggcaccggcgggctttaaaccacagcatctactgatcctgctcctcagcaaggctctggcttctttcctgagtatttgggtctaagtagtagtggccggttggttaaacatacaggcttttaatttctgtggacagaagtttgggaatcgttgggcttgaagcccaaggccccttaaacgtggccgggttaacaatacctttaactaactg

SEQ ID NO: 737 - DNA, 255 bp, Rattus sp.
atccgcctaaccggggccccgcccaaggaacaagcaacccccaagcaaaaaacgcaacaaagggcccaagaaaaagtccggaaaagaaggccgaacctcaaaaaaccccaagaaaaggccccgcccaaacatagaacggccaacaaaatgacaaacgcccaggctgcatagatacctccatattgctgtgcaggcttccatgcgccaaaagcaaggccagtggcagtgactgccaagagtaaaccaagtaagaag

SEQ ID NO: 738 - DNA, 255 bp, Rattus sp.
  modified_base (135): a, t, c, g, other or unknown
  modified_base (137): a, t, c, g, other or unknown
cagggctgctcctatgggtcttcaaggggaagcagcacaacccagtgtgagtcgaatgagtttaaacacgagaacttctgctgccaactctgccctgctggcactcacctcattaatccatgccacaggaaccgngngtgagagtgaatgtgccccatgtcaagctcaacacttcatagatgtgaacaacagggaacctggctgctctcgcttgctctaagagcccgggattgaccaagaaagaaagtgttcgaa

SEQ ID NO: 739 - DNA, 227 bp, Rattus sp.
acaagctttttttttttttttttttttttttttttttcggagctgaggaccgaacccagggccttgcgcttgctaggcaagcgctttaccactgagctaaatccccaacgagatctacggttttaaaactcctcttgctgagctgcccagtaggggataattggcacagcttttccaaagaacctaatccaaaccaggcatgggccagcacccctggtaatcctagt

SEQ ID NO: 740 - DNA, 255 bp, Rattus sp.
actgaacctgtgtcccagcgttacacttcatggtctgcactcagagctcactcagctagtgctgaagtcaccgtccatggttgaagggtgacaagctacacatagaggcagagcccacttgttagctgagccacaattgcacagtcgtggagaccattggtgtctgaggttgctgagtccatggcttcccacactgcagtatttccaatacctagtgagggccgtcttgtcagccaagttttaaaacaaatacct

SEQ ID NO: 741 - DNA, 255 bp, Rattus sp.
acctgacaggcacatacgtgcaggaggagtctccggaaggtggcaggttcaagaaggagattgttgttgatggacagagttatctgctgctgattagggatgaagggggtcccccggaggcacagtttgccatgtgggtggacgcggtcatctttgtcttcagcttggaggatgagatcagtttccagaccgtctaccattactacagccgaatggccaactacaggaacaccagtgagatcccattagtgctgg

SEQ ID NO: 742 - DNA, 255 bp, Rattus sp.
gggtggggctcaaaaggtgaaaaaaatatcaaacaagtattaaacagcattattaataagtttgccagactcctggtcatgaataactttgtggttcgcattgaatcctgaactgaacattgttgactacctagctacctccaagtaaactgagaactacctagcaaactctgaacttcagtccggtgggccgagctgggtcttcctttttgtagttttgcagtatagggtggtgatatctcctgtttgcaaaac

SEQ ID NO: 743 - DNA, 218 bp, Rattus sp.
ttcggcttagcgtggtcgcggccgaggtactcctggtggcgctcttcccgaagcttcttctgctcttgcttaagccgctgctttatctcttcaatggctgccttcttgcgctccaccttccgcttgtggaagcctgtcaggtattcccgccgcttctcttcatcaaagttgaggatgagccggggacgccggtcatctccatctctttttttcttctt

SEQ ID NO: 744 - DNA, 175 bp, Rattus sp.
tggaaacttctacatcctggctgaagataaaatatcacctgttgcttctgccttggaaacaacatttgatgttactgcaacgttttcaggtgtggatctggaaggtggcacttgtagtcaccctttaattcccgataaagtgtctcctcttttacctgccactcacgtgactatg

SEQ ID NO: 745 - DNA, 255 bp, Rattus sp.
cagatgggccaaccttggggcctctcagctggaagggcgttggatggacaccaggcagtccctgcggccagaagtttgcctggcttctggccccagctcctaggcctgcccagcaatcatggaatcagcccttgttcccaaccagtgcagtgggcatcttcaggcagaactcaagaagctagcagagggtccataccacctctacaaggcccaagggggcttgtgggtaagacagcaagaaaaaaaactatagtc

SEQ ID NO: 746 - DNA, 255 bp, Rattus sp.
  modified_base (145): a, t, c, g, other or unknown
  modified_base (148): a, t, c, g, other or unknown
atcgaagtgcccagtagggggatgagggcactcccctgtgctggggcaccgccgggctttagaccacagcatctcactgatccctgctccctcagcaaggctctggcttctttcctgagtatttggttctagtagtagtggcggntgnttagacatacagtctttatttctgtgacagagtttgtgatcgtgggctgagcccaggccctcacgtgccgctcacatactctactactgggctccactccagccctc

SEQ ID NO: 747 - DNA, 255 bp, Rattus sp.
  modified_base (50): a, t, c, g, other or unknown
  modified_base (126): a, t, c, g, other or unknown
  modified_base (171): a, t, c, g, other or unknown
acaagcttttttttttttttttttttttttttttttaatcaaaagacaantttatttggacagaaaccttcagacagaacatagaggaattaggcattattaaaatacactcttgccaagggattnaacattagaatatgggggggggatgggaaacacaggacaactcanccactgcaggggaagcgagcagaccctggagacagccacacgtaggcaaagggtacctttcccccacaaacttctacctccacc

SEQ ID NO: 748 - DNA, 255 bp, Rattus sp.
ccctggtggtggtatcttactttcttattaccggaggaataatctatgatgttatcgttgaacctccaagtgttggctcaatgacggatgaacatgggcatcagagaccagtagctttcttggcttacagagtaaacggacagtatattatggaaggacttgcgtctagctttctcttcacaatgggaggcttaggtttcataatcctggaccgatccaacgcaccaaatataccaaaactcaataggtttcttc

SEQ ID NO: 749 - DNA, 255 bp, Rattus sp.
cgaaaagccatctttgcattgttcccgggtcgtgctccgcgctcactgcagccaccttcgccgcccaccgtctcctccaacgcggactccggcagttttctcgccagagtcctcgaaactcgactaattccttacgcgtagcaccagaccaccggcgtgccccaccatgtcagacgcggcagtggacaccagctccgagatcaccaccaaggacttgaaggagaagaaggaagttgtggaggaggcagagaatgg

SEQ ID NO: 750 - DNA, 255 bp, Rattus sp.
aggaaactttagccatggatgtgagtcacggaggcttattcctgaactgaatatcaccttctgcaatcaaaccagaacggcatgttttaatgagaatgaacaccgttctcattctctcattcttttaacgttacacagaattagagattgctgtgaatttttttttaatttgaaatccggattaaagtgaaagcagtgggagtgaagctttacaaatattacattactatgtcattgacatggcttttacactga

SEQ ID NO: 751 - DNA, 255 bp, Rattus sp.
actccgttcacctcctcctcaagactgccaacgaaggagggtctttattatacgaacagttgggacataaggcatacggtctggctgggaagctggcagcctccggatcgattacaatgcagaacatcggagctatgtcaagctacctcttcatagtgaaatatgagttacctttggtgatcaaggcgttaatgaacattgaagatacgaatgggctgtggtatctgaacggcgactatctggtccttctggtgt

SEQ ID NO: 752 - DNA, 255 bp, Rattus sp.
atgcagctctcaggagaagaggcccccctaagattgtcagaggagccacgactgcacccatcacaccagaatgcagcatccaggccagatgctttgggcctgggctctgctcatacgatattgactggaccagcattccagctccaatcatggctgcgaaggttgcaccaattgtcatccaagagcctgtcatcatgaagttcatgagggcaggtgatctggctaatgccagggcagacaacgctgttaaaccaa

SEQ ID NO: 753 - DNA, 255 bp, Rattus sp.
acaagattggcatcaattactgcctgaacctgctgttgatttcctgcggtgatgttggagaggaaccacactgcttccttattaattttctctttgggatgagtgaggagtgctgggaagtgtgagagagcatcacagtttaaaactacttgtgtttgctcatcagttccagtgacaatgttgcccacagctcgcagtgcagcagtctgaactttaacttcctggtggctgagtagccggaaccaaatgaggaac

SEQ ID NO: 754 - DNA, 255 bp, Rattus sp.
  modified_base (70): a, t, c, g, other or unknown
  modified_base (76): a, t, c, g, other or unknown
  modified_base (132): a, t, c, g, other or unknown
  modified_base (149): a, t, c, g, other or unknown
  modified_base (189): a, t, c, g, other or unknown
  modified_base (198): a, t, c, g, other or unknown
  modified_base (242): a, t, c, g, other or unknown
  modified_base (249): a, t, c, g, other or unknown
acaagcttttttttttttttttttttttttttttggtgcaacctttgacctttattcatgtcctgccctnccaccnagtaaagtcaaatacaaggctactacccaaagcagaaaccccagtccctatcctanactcctcctgtgagccnaaaatatataaagtgctggtgtgtaatatggggaaggccnaacggactnagaaccccacccctggacctcatcaggaggaggagcccttgcanaaaaaanggcagg

SEQ ID NO: 755 - DNA, 255 bp, Rattus sp.
tcactttgtgatggttgtaggcgccctaccagagtccccaccaagaagtcatatctctagtgctgaagacatcactcagcttgggagtccgaggacctggggcttcctgggcctgagctttgcctgtgaagcaaaggaagttctctgatcaaaagccaagttttccttcccactgtctcccaagacacctctgtcttcgtcttgctaccgctgagagttgcatggggcacttgtctaaaaattcagcctcccaga

SEQ ID NO: 756 - DNA, 218 bp, Rattus sp.
tgagacagttcagtgttgtgggtggttggttttccttagcgtttagaatagccatcattgtcctgcaataggcagagctatcacgtccaggaaaaatgaggggaaccagaggcagcgtgagatccaaatacagcattcaaaggtaattggtccagtggtgcctggggaggaggaaggggatgatactccagggttagccatcttccttcggaggtgtg

SEQ ID NO: 757 - DNA, 255 bp, Rattus sp.
tgcaccacgtcgggtggtttccattcagacagaggccagttcagaacttcccagatgacggtccccctcaggaagctgccaaccaggaccccaacaataacctccagggaggtttggaccctgaaatggaagaccccaaccgcctccccgtaggccgtgaagtgctggaccctgagcataccagcccctcgttcatgagcacagcatggctagtcttcaagactttctttgcctctcttcttccggaaggcccac

SEQ ID NO: 758 - DNA, 255 bp, Rattus sp.
  modified_base (93): a, t, c, g, other or unknown
  modified_base (107): a, t, c, g, other or unknown
  modified_base (116): a, t, c, g, other or unknown
  modified_base (125): a, t, c, g, other or unknown
  modified_base (133): a, t, c, g, other or unknown
  modified_base (138): a, t, c, g, other or unknown
  modified_base (141): a, t, c, g, other or unknown
  modified_base (152): a, t, c, g, other or unknown
  modified_base (160): a, t, c, g, other or unknown
  modified_base (164): a, t, c, g, other or unknown
  modified_base (169)..(170): a, t, c, g, other or unknown
  modified_base (172): a, t, c, g, other or unknown
  modified_base (174)..(175): a, t, c, g, other or unknown
  modified_base (184): a, t, c, g, other or unknown
  modified_base (187): a, t, c, g, other or unknown
  modified_base (194): a, t, c, g, other or unknown
  modified_base (196): a, t, c, g, other or unknown
  modified_base (204): a, t, c, g, other or unknown
  modified_base (208): a, t, c, g, other or unknown
  modified_base (212): a, t, c, g, other or unknown
  modified_base (215): a, t, c, g, other or unknown
  modified_base (217)..(218): a, t, c, g, other or unknown
  modified_base (221): a, t, c, g, other or unknown
  modified_base (227): a, t, c, g, other or unknown
  modified_base (230): a, t, c, g, other or unknown
  modified_base (251)..(252): a, t, c, g, other or unknown
  modified_base (255): a, t, c, g, other or unknown
tctcttttttttttttttttttttttttttttttaaaaagaaatttttgcctttattaaaatggctttaggccttaaatatgccaattttggnaatcacattattgntttaataanaaacgactntacagaanggcanaantggaccaacanccttgttnttcntttanngngnnaaccatacnggntgtaacnanacaagcanggcnaggnatnanntancccagnatnctatcttttttaaacccaagnnttn

SEQ ID NO: 759 - DNA, 255 bp, Rattus sp.
  modified_base (30): a, t, c, g, other or unknown
  modified_base (62): a, t, c, g, other or unknown
acccctgagtctgagtctgacacagcaggnaaacgggcctccctgttggaagcacacagaanctgcaaatggtggacagtgctggcaagtccgtggctggtgctgatctgctgccggctactgcgctccttgaaccagacaggggtgcagggagcccatcgccctgactttagtcactggcttaccagctctgaccacaaagtccatctctcaggcctggctgccctctccctggttgtgatcttcattttagtt

SEQ ID NO: 760 - DNA, 255 bp, Rattus sp.
cctgagtctgagtctgacacagcaggtaaacgggcctccctgttggaagcacacagaagctgcaaatggtggacagtgctggcaagtccgtggctggtgctgatctgctgccggctactgcgctccttgaaccagacaggggtgcagggagcccatcgccctgactttagtcactggcttaccagctctgaccacaaagtccatctctcaggcctggctgccctctccctggttgtgatcttcattttagttcag

SEQ ID NO: 761 - DNA, 255 bp, Rattus sp.
tctgatccattccaggagtctctcccacctgtccagtttgactggagtagcagtggccttactaaccctttagatggtgtgaatccagagttgtatgaattaacaactgctaagctggagacctccacctcaagcctcagagtgactgacgcatttgcgaagctcatgtctacagtggaaaagacgagcacgtcgaccaggaaaccaaaaagggaggagcacctaagcgaggaggccgtaaaggtgatcgtcagc

SEQ ID NO: 762 - DNA, 255 bp, Rattus sp.
atttgattcaaacctgtccaaccagcctgaactgctaatgaaagaactcaaacacacaggggggaactgtgtaggacctttaagtctctctgccaatgtggcaaaaaaaaaaaaaaaaaaaaaaggtggagaggggtgggggtggggtagaaaagacaaaacaactgacatcaggtttgctttgcccctgcactggggtggccctacctcctgctacaggtgcaatactggaggacaggcactctaggcatggtt

SEQ ID NO: 763 - DNA, 255 bp, Rattus sp.
  modified_base (37): a, t, c, g, other or unknown
  modified_base (47): a, t, c, g, other or unknown
  modified_base (54): a, t, c, g, other or unknown
  modified_base (58): a, t, c, g, other or unknown
  modified_base (71): a, t, c, g, other or unknown
  modified_base (74): a, t, c, g, other or unknown
  modified_base (77): a, t, c, g, other or unknown
  modified_base (85): a, t, c, g, other or unknown
  modified_base (87): a, t, c, g, other or unknown
  modified_base (90): a, t, c, g, other or unknown
  modified_base (94): a, t, c, g, other or unknown
  modified_base (96)..(97): a, t, c, g, other or unknown
  modified_base (104): a, t, c, g, other or unknown
  modified_base (110): a, t, c, g, other or unknown
  modified_base (123)..(124): a, t, c, g, other or unknown
  modified_base (134): a, t, c, g, other or unknown
  modified_base (140): a, t, c, g, other or unknown
  modified_base (146): a, t, c, g, other or unknown
  modified_base (149): a, t, c, g, other or unknown
  modified_base (152)..(153): a, t, c, g, other or unknown
  modified_base (155): a, t, c, g, other or unknown
  modified_base (162): a, t, c, g, other or unknown
  modified_base (165): a, t, c, g, other or unknown
  modified_base (175): a, t, c, g, other or unknown
  modified_base (178): a, t, c, g, other or unknown
  modified_base (180): a, t, c, g, other or unknown
  modified_base (184): a, t, c, g, other or unknown
  modified_base (191): a, t, c, g, other or unknown
  modified_base (200): a, t, c, g, other or unknown
  modified_base (202): a, t, c, g, other or unknown
  modified_base (206)..(208): a, t, c, g, other or unknown
  modified_base (210): a, t, c, g, other or unknown
  modified_base (215): a, t, c, g, other or unknown
  modified_base (217): a, t, c, g, other or unknown
  modified_base (219): a, t, c, g, other or unknown
  modified_base (224): a, t, c, g, other or unknown
  modified_base (232): a, t, c, g, other or unknown
  modified_base (238): a, t, c, g, other or unknown
  modified_base (243): a, t, c, g, other or unknown
  modified_base (245): a, t, c, g, other or unknown
  modified_base (251): a, t, c, g, other or unknown
acccaccactcagccaaacgctgtctcaagaagtagngaacacacancttgccntggnacgcccaaaaacngcnganaaagagcnantanttcnannttatgcnaatccnttggtggaaagannctttgcaaanttccancctttnaanaannanggcttgnccnagaattttcnccncnaatngggaatnggggttcantnaccnnngnttggntncnaatgntaaacccncttttnaaccngnccgaantctg

SEQ ID NO: 764 - DNA, 255 bp, Rattus sp.
  modified_base (38): a, t, c, g, other or unknown
  modified_base (169): a, t, c, g, other or unknown
  modified_base (197): a, t, c, g, other or unknown
  modified_base (220): a, t, c, g, other or unknown
acatctacaaaaggaaaagtgacggtatctacatcatnaacctgaagaggacttgggagaagctgttgttagccgctcgagctattgttgccattgagaaccctgctgatgtcagcgtcatctcctccaggaacactggccagcgagctgtgctgaagtttgccgctgncacaggagccactccaattgctggccgnttcacacctgggaccttcactanccagatccaagcagccttcagggagccccggcttt

SEQ ID NO: 765 - DNA, 255 bp, Rattus sp.
acgcagaccttactgaggaccagctaccctcctgtgagagcctgaaggatactattgccagggcactgcccttctggaatgaagaaattgtcccccagatcaaggaggggaaaagggtcttgattgctgcccatggcaacagcctacggggcattgtcaagcatctggagggtctgtcagaagaggccatcatggagctgaacctgccaactggcatccccatcgtctatgaactggacaagaacttgaagccca

SEQ ID NO: 766 - DNA, 255 bp, Rattus sp.
  modified_base (4): a, t, c, g, other or unknown
  modified_base (29)..(30): a, t, c, g, other or unknown
  modified_base (32): a, t, c, g, other or unknown
  modified_base (45): a, t, c, g, other or unknown
  modified_base (52): a, t, c, g, other or unknown
  modified_base (55): a, t, c, g, other or unknown
  modified_base (59): a, t, c, g, other or unknown
  modified_base (84): a, t, c, g, other or unknown
  modified_base (87)..(88): a, t, c, g, other or unknown
  modified_base (95): a, t, c, g, other or unknown
  modified_base (112): a, t, c, g, other or unknown
  modified_base (145): a, t, c, g, other or unknown
  modified_base (158): a, t, c, g, other or unknown
  modified_base (164): a, t, c, g, other or unknown
  modified_base (174): a, t, c, g, other or unknown
  modified_base (186): a, t, c, g, other or unknown
  modified_base (237): a, t, c, g, other or unknown
  modified_base (245): a, t, c, g, other or unknown
  modified_base (255): a, t, c, g, other or unknown
accnggaccccaaactgaggactgagatnncnagacccagcttcntcagggngtnggtncacccgaaatcctgaattctggatnctnnctccctnttccccactgaggaaanttacgagacttaggacatctcaaacggtgcatntcaaggggcccangagctnacatccctgngacccggggatnttggaccctgactttgtctaaaagcccaacccagacttcaagacggttctngacactgnaaacactcan

SEQ ID NO: 767 - DNA, 255 bp, Rattus sp.
tgtaaaggaatcctggggaggctccccaggaaaatcacaggctcctccacacttgctggaaacattggagagtgagctggtagcttccttctctggacactgttcaggtggcttccctaagccatcagaagtccttactctgctcctctcgggctgaagggcccggggccagtgcttcagtttcttccaggactttgatctcagaggtgctcttcatttcccaggacacagaagtattaagcaacttataactaa

SEQ ID NO: 768 - DNA, 255 bp, Rattus sp.
  modified_base (53): a, t, c, g, other or unknown
  modified_base (68): a, t, c, g, other or unknown
  modified_base (72): a, t, c, g, other or unknown
  modified_base (115): a, t, c, g, other or unknown
  modified_base (132): a, t, c, g, other or unknown
  modified_base (151): a, t, c, g, other or unknown
  modified_base (202): a, t, c, g, other or unknown
  modified_base (206)..(207): a, t, c, g, other or unknown
  modified_base (210): a, t, c, g, other or unknown
acaagctttttttttttttttttttttttttttttgattctgatagggagaanatggccaaaaggtcnccantgccaggcatctgggcataaaaatgggtatggacaacaaggcntaggaaacaatgcatanaaagttagaaatttaaagngtatgttttggggagggaggtgctggcgaaagggcttacagatagcatganaccnnagnggttttgattggtgtttctggctggcacttacagctctgggacat

SEQ ID NO: 769 - DNA, 255 bp, Rattus sp.
acttatgaaagctccaagagccaacgaggtgacctccaaagtattgtcaccttcgacctggccctagatcctggccgcctgagtccccgggccatcttcaaggagacaaagacacaggcgctgactaaagttagaaccctcggtctgagcagtcactgtgaacctgtgacgctgctcctcccggcctgtgtggaggactcagtgactcctatcactttgcgtctcaacttctctcttgttggagtgcccatccct

SEQ ID NO: 770 - DNA, 255 bp, Rattus sp.
acagatgaggagagctcacatttagccttctcagcagcttcccgaaccctctgaagtgccatgttgtctttggtcaaatcaacccctgtctccctcttgaactccttgacaatgtgccgtaacaaagcttggtcaaaggcttcacctcctaagaaagtgtccccattggtggatttcacctcaaacactcctttctgaatttccaggatagaaatgtcaaagggtcctccacctaaatcatatacagcaatgact

SEQ ID NO: 771 - DNA, 255 bp, Rattus sp.
acatctcctttgtgtgcgcacaaagagtcaccaaaatgaaacttcgctaactccagcagttcgttatggcaaacacctccagcagcagccagcacgattcttggtcccttataatgtgtggttatgtagtccactaagtccttacggcttatagatttgatgttctcggttggtcccagaattgtccgtccgagcgcggtgttttgataggctgtggcgtgcagataatcaaagacaacttcttgcaagttggtc

SEQ ID NO: 772 - DNA, 255 bp, Rattus sp.
  modified_base (3): a, t, c, g, other or unknown
  modified_base (14): a, t, c, g, other or unknown
  modified_base (19)..(20): a, t, c, g, other or unknown
  modified_base (22): a, t, c, g, other or unknown
  modified_base (237): a, t, c, g, other or unknown
  modified_base (242): a, t, c, g, other or unknown
ttncgagcggccgnccggnntnggcacctgaacgtgagagaagctgtgcttgggggctacgacactaaggaagtcaccttttatcctcaagacacccctgaccaacccctcacagcactggcctatgtggccaccccacagaaccctggctacctgggccctgctcccgaagaggtcattgccacacagatccttgcttgccgaggcttactctggccacaaccttgaatacttggnagcgnttggcaggacttc

SEQ ID NO: 773 - DNA, 255 bp, Rattus sp.
acaaaaagctgagtgtgttctcaggcagggatcctccgggaccaggtgaggaagaatttgaatcttggatgtttcatacttcccaagtaatgaaaacatggcaggtgtcagatgtagagaaaagaaggcggttgatggagagccttagaggcccagcattcgaaattattcgagtcctcaagataaacaacccgttcattaccgttgcagaatgcctgaagacgcttgagacaatatttgggattattgataatc

SEQ ID NO: 774 - DNA, 255 bp, Rattus sp.
acaagcttttttttttttttttttttttttttttttgcttggcaaaatgttttattccgaataattttattgggagtcacataaatctcactctaggttttacacaaaaacggaagttacatagctgcaaatcccagctctcccttgaaaatacattcaagttcataacaaatgttaattgcacttaaaaattaaataggatgtgaagaaaggatgcaatataaagacactcaagacctttccatttaatctgcc

SEQ ID NO: 775 - DNA, 255 bp, Rattus sp.
  modified_base (94): a, t, c, g, other or unknown
acacccccccagatggaggctggggctgggcggtggtagttggagccttcatttctattggcttctcctatgcatttcccaaatccatcactgncttctttaaagagattgaaattatattcagtgcaacgaccagtgaagtgtcatggatatcgtccatcatgctggctgtcatgtatgccggaggtcctatcagcagtatcttggtgaataaatatggcagccgtccagtaatgattgctggtggctgcctgt

SEQ ID NO: 776 - DNA, 255 bp, Rattus sp.
acctggagcacgtgttccggcacgcagcccaagagctgtttggaatccatgtggctgacgtcacctaccaacccatgaggaacaaggacttccaggaagtgacactggagagggaaggccaggtgctgttgcgctttgctgtggcctatggcttccgcaacatccagaacctcgtgcagaagttaaaacgaggccgctgtccctaccattacgtggaagtaatggcctgcccttcaggctgcttgaatggagggg

SEQ ID NO: 777 - DNA, 255 bp, Rattus sp.
accttaataccaaatataattttattgaaaacacacaaagcaaagataattgttataaaaagttgatccttaggatgattttaaggtcaattaattcagtgaaagacctttaaatcaactttagcagctatccatggtaattctttgttgtttcttgattaaaataatttgcttcctgataacagtggatcgtcattgggagtggtttgtatccccagtgagactctgtccaaaagaactgatctatttacaaat

SEQ ID NO: 778 - DNA, 255 bp, Rattus sp.
ttcggctttcgagcggccgcccgggcaggtaccttcaatgaaatgcaagttactaagcgtgaacggctttgctttttcacgtgattaagaccctacttcaaactgtagaagcttttcaagagccatattactctcctgatacttcattaatctccatcatgtatgccaagcctgacacatgtgacagagaagacaatgtggcttgctcctttttgaatctaaagataatgcatgttttacagtacctcggccgcg

SEQ ID NO: 779 - DNA, 255 bp, Rattus sp.
  modified_base (32): a, t, c, g, other or unknown
  modified_base (35): a, t, c, g, other or unknown
  modified_base (39): a, t, c, g, other or unknown
  modified_base (80): a, t, c, g, other or unknown
actgcaaagagccagaggggccctagaagaanctngggntgtgccaggtaagaaccctacagaatatcatgcccagcagntttattttgaaaataagctaaactgttattggaaaagctttgaaggaatgagacagatgttgctcacagaacagctttctaagcaacaaagtaatgatgtcagtaaacccagaaaacgtccccagaataaaaaatggcaggtgctggaaaaacgatggccagagactctcaggac

SEQ ID NO: 780 - DNA, 255 bp, Rattus sp.
  modified_base (31): a, t, c, g, other or unknown
  modified_base (239): a, t, c, g, other or unknown
  modified_base (245): a, t, c, g, other or unknown
tacatccaggacctctgagtccagaaccacngccaatgggtgtcagggtcatctgtggacattgcaagaatacgtttctgtggacagaattcacagaccgaaccttggcacgatgccctcactgcagaaaagtgtcatctattgggcgcagatatcctaggaagagatgcatttgctgcttcttacttgggttactcttggcagtcactgccactggccttgcttttggcgcatggaancctgcncagcaatatg

SEQ ID NO: 781 - DNA, 255 bp, Rattus sp.
acaagcttttttttttttttttttttttttttttgttcttataaatgaagctttatggaaaaaggctgtgtgaactagatttcataaggaccaggtttgtaacaatgttaacagttccatagagaaccacaaatgcctaacatagcatctgaggctgtatttgagaagtttattcccagttccacgaactccagaggaaacattaacacaatatgaaaagacgaaagaaagaaagaaagaaagaaagaaagaaag

SEQ ID NO: 782 - DNA, 255 bp, Rattus sp.
accaactatcgagctggctaccaaggtgcccatgacctgttgctctatgacaacgcccaaatcggtatccgccatcccaacatcatctgtgactgttgcaagaaacatgggcttcgtgacatgcgttggaagtgccgtgtctgctttgactatgatctctgcacgcagtgctacatgcacaacaaacatgaccttacccatgccttcgagcgctatgagacatctcactctcgcccggttacgctgagtccccga

SEQ ID NO: 783 - DNA, 121 bp, Rattus sp.
acattaagacaacaggtgatcatttgtcctgtcactgccccatgtcaccttggcagtccctctaaggaaggaaggaaaggaagatagaagaaagggaggaagggagggaagtcagtcttgt

SEQ ID NO: 784 - DNA, 255 bp, Rattus sp.
  modified_base (52): a, t, c, g, other or unknown
  modified_base (169): a, t, c, g, other or unknown
  modified_base (252)..(253): a, t, c, g, other or unknown
acacgtgactgcctgcttagtggtgcatgcacctgcactcgggtttccttgntttgcaggggtttcttagaaccagtataatgaattcaagcacaggcagaattgtttttgacaatgagtcgctgttccccagatctagtgtgttctgaaaatggagaacctgcctgtnttggctcctcaacagaagctgcccacaggaggcaggacagtgcttaggtcattcatgatgactgatttcgtgatcagactacnngt

SEQ ID NO: 785 - DNA, 255 bp, Rattus sp.
  modified_base (80): a, t, c, g, other or unknown
acctctctcagtaacaggatgaaggaggcaaagtagaacacatagaccattcccaccaaccagtgcagaaacattgtggnccctggggctgactgaaagctcagctctcgatctttcagagtagcatcaaacatttccagagaacaaatatccagccaccagccacagatgagagggaacactccaatttctaccacaactaacagagagaccttaaccacaatatagcagacgcccagcaagcgacgagaccta

SEQ ID NO: 786 - DNA, 255 bp, Rattus sp.
tacatctttttttttttttcccccatagtttgtcatctgattttgttagtcctgacttgttagtccttttcagcgggtaatctgggaggcagtgttatccctccctctgctaggtatgtaatgaacccttgcactcaccatgactccccttgaaggctggttcttccagctatgcttgatgttgctctgcacaggtcctgggacctatgggatggggatgacatcatactcagtaggccaagtttttatagtagt

SEQ ID NO: 787 - DNA, 255 bp, Rattus sp.
  modified_base (8): a, t, c, g, other or unknown
cctacagngccctgcacgaagtagggaccccacactagatatcccctcttgtaaagcacgagcccaactcactggctatctgattctcaccctcctttttagtccgaggaacagtgtgaccccttggaacgagatttagaaagagggcattcatgcacagaattctggggcctggcacagctccctgcccaggagctcagcttgctgctgagggctgggtgtgaccatgtctgcctccggctgctgggagaagct

SEQ ID NO: 788 - DNA, 157 bp, Rattus sp.
gatcataaagcctggagatgagggggtcattcacttggctaaactccagacagagaaaccgtcctccaggctttaggactcgatgggcttcctggagagcccggtcaatgtgcgtgacattccggatcccaaaggcaatggtgtaaacgtcaaatct

SEQ ID NO: 789 - DNA, 255 bp, Rattus sp.
cccgggcaggtactaagaatggactgggggcctcaggcctgctaggcaagcactctgttattgagctgtatcttcagtctgtaaatgcagtcagttaaggtggttgcatgtgggagcctctaatccaatacggctgatgctctgacaaaggagtaaatgtgtatctatctccctgagatacccacacagggaagatgccgtgtggacttgaaggcagagatcagaacaatgtatctacaagccaaggaatgccaa

SEQ ID NO: 790 - DNA, 127 bp, Rattus sp.
  modified_base (2): a, t, c, g, other or unknown
gngcttcacgtggccttggagtgcttgcgagtgtttggagctttgcttcagcctgttacaccaaacttagctgataagttgctgtcaagactgggagtctctaccacagagagaagccttggagagc

SEQ ID NO: 791 - DNA, 255 bp, Rattus sp.
  modified_base (217): a, t, c, g, other or unknown
  modified_base (252): a, t, c, g, other or unknown
accccttcagatcaccagcctcaagaagcagcacagtttgagaggaaagatgaacccaaagctgaacaaatggaaaaggctgaagaagagagtcggtcagaaaacagtctcccagccaagatccccagcagaggggacgaaacggtgcctgcctcccagcaaccctcgacacagcttcctccagacacagcctctcctctcctcatcctgtcacctnctctttctactcctaagttctggctcacgggcagntga

SEQ ID NO: 792 - DNA, 255 bp, Rattus sp.
cttagcagtgggtagctcactgttatcgttttccgggtcatccttctgaaacacgatgatgtcaccatccatcagctcatcgagggctttatcaagagacacatcatagtcctgaattctctctgttaaattcggcttaacttcctcatagaggataaggctagtatcctggataaatcctgctctgtcacacataaccgggagcaagtcacgtattttacaggatatgggtgtgtagatgtgtccacagtaatt

SEQ ID NO: 793 - DNA, 255 bp, Rattus sp.
cacaagtggatccacaggaattccaaagggagtcatgatctcacacagcaacatcattgcctctataacggggatggcgagaaggattccaagactgggagaggaagatgtatacattggatatttgcccctggcacatgttctagaattaagcgctgagcttgtgtgtctttctcatggatgccggattggctactcttcaccacagacattagcagatcagtcttcaaaaataaagaaaggaagcaaaggaga

SEQ ID NO: 794 - DNA, 255 bp, Rattus sp.
gcggccgaggtacttggccaggcgctcagatcggcagggggcaccagtcttgatctgcccagtgcagagccccaccaccaggtcggcaatgaaagtgtcctcagtctccccagatcgatgggacaccatgacaccccagccattggactgggccagcttacacgcctgcagagactcggtcacagagccaatctggttcactttgagcaggaggcagttgcaggacttttcgcctgcagccttggcgatccgctt

SEQ ID NO: 795 - DNA, 255 bp, Rattus sp.
  modified_base (9): a, t, c, g, other or unknown
  modified_base (12): a, t, c, g, other or unknown
  modified_base (21): a, t, c, g, other or unknown
  modified_base (34): a, t, c, g, other or unknown
  modified_base (47): a, t, c, g, other or unknown
  modified_base (56): a, t, c, g, other or unknown
  modified_base (69): a, t, c, g, other or unknown
  modified_base (71): a, t, c, g, other or unknown
  modified_base (101): a, t, c, g, other or unknown
  modified_base (128): a, t, c, g, other or unknown
  modified_base (211): a, t, c, g, other or unknown
  modified_base (251): a, t, c, g, other or unknown
acctgcggntgngcagagcanctaaggccacggngtttgagaatgcngctgtttgngatgaaattgctngncttgaggaaaaattccttaaagcaaaggangaaagaagatacttgctgaagaagctnctccagatccatgctctaactgaaggggaaccacaggctgccgctccttcccacagctccagtttgcccctggcttatggtgncaccagctctgtgggaaccatccagggagccgggcccagnactg

SEQ ID NO: 796 - DNA, 255 bp, Rattus sp.
ataaaaatgtaagatatgcaaactaaagttcctttaaatacggtgacaggtttggtcctaatacttgcttcttggatatcgcagctgactgccatgttctttgatgactagtgataagcaccattgagagctgatcctacctaggagaagggtggatctcttcttcctcacatccttacctcttcttagcatcccaaatgcagggcatagagcaggagagaagcacttctcatgccaccggtggctgtaggcacc

SEQ ID NO: 797 - DNA, 255 bp, Rattus sp.
  modified_base (80): a, t, c, g, other or unknown
  modified_base (131): a, t, c, g, other or unknown
ctgggttgccacctcacgctgcttctgcccaccaaagctgcattttggcaagaagtggagtggagaagacatgagctggngaagagcaaaccctacatgcagatgtggacactggcctctcaaagagtggngtgtgtagatgcctgccccagctagagctgggcagaggtgacagggagcctagcctctgaggcttcactccagctttttggttggcacccgggtccgtgcaatgataatgggcaccagagccag

SEQ ID NO: 798 - DNA, 255 bp, Rattus sp.
accagggcaccagcgtgggcaggatgaagcacatgagcaggaggccgggcttgtaatacctcctctggaacatcaccagcttctcagctttcaggtcagacatgtccagctttccgcccttctctttgacagccgggtgtttgcgcacaagcagccaacccacgtgagagaagaaaaagccacggcgggagttgtgagggtcggcagtgtgtctctgagaacttgtggtgggcgcggtgatcccgggcccattcg

SEQ ID NO: 799 - DNA, 255 bp, Rattus sp.
ctgattccaggattcccaagaggcattttttggccatctcagaagccagggtcacccacctgtggtctcagggcatcaatttcctctgagtgctgactcggagtaaaagtgtaaacacacccaagaccaaggctgcaaggactgtcctctcatccatctatgcgtctgtcaagtgcattagtcggacaactggggctaagggcagggacagatgttgactgcttaagcaggaatagcccaagcttgtaagaaaaa

SEQ ID NO: 800 - DNA, 255 bp, Rattus sp.
acatccctcttttctgttaagtaaggtttgtcaagtgttcttggatggagagggggaaaaaagcccctttcattgcaacctgaatgaatgaagcaacaagagtaagtttctttcaatcgctaatatgtcagtgacgttactgtccagacatgtgttaacattaacacgagtaatagatggtcttacaaattctcgaaaaatgtaaatcatccaatttcaaaacgttacagaatagtctattggattttgcaactg

SEQ ID NO: 801 - DNA, 255 bp, Rattus sp.
  modified_base (20): a, t, c, g, other or unknown
  modified_base (33): a, t, c, g, other or unknown
  modified_base (48): a, t, c, g, other or unknown
  modified_base (90): a, t, c, g, other or unknown
  modified_base (95): a, t, c, g, other or unknown
  modified_base (116): a, t, c, g, other or unknown
  modified_base (127): a, t, c, g, other or unknown
  modified_base (166): a, t, c, g, other or unknown
  modified_base (172): a, t, c, g, other or unknown
  modified_base (184)..(185): a, t, c, g, other or unknown
  modified_base (190): a, t, c, g, other or unknown
  modified_base (196): a, t, c, g, other or unknown
  modified_base (199): a, t, c, g, other or unknown
  modified_base (201): a, t, c, g, other or unknown
  modified_base (205): a, t, c, g, other or unknown
  modified_base (207)..(208): a, t, c, g, other or unknown
  modified_base (210): a, t, c, g, other or unknown
  modified_base (212): a, t, c, g, other or unknown
  modified_base (223): a, t, c, g, other or unknown
  modified_base (226): a, t, c, g, other or unknown
  modified_base (228): a, t, c, g, other or unknown
  modified_base (230): a, t, c, g, other or unknown
  modified_base (236): a, t, c, g, other or unknown
  modified_base (240): a, t, c, g, other or unknown
  modified_base (243): a, t, c, g, other or unknown
  modified_base (249): a, t, c, g, other or unknown
  modified_base (252): a, t, c, g, other or unknown
actttccgcctagggcttgncaaatcaacaagnccctcaccaccctgnccactagcgctcaccctcccacaggattagaccagtgccagntctgnagccagtggtggacacaatcnccaggccccanagggtttccttcttcacccagggccaagataactgtctntcccanacggagacaggnnccctnatgaanccncnccancnncnanaaccgtcttancgncncngtaccnaggnccnggcctnaangga

SEQ ID NO: 802 - DNA, 255 bp, Rattus sp.
  modified_base (139): a, t, c, g, other or unknown
  modified_base (153): a, t, c, g, other or unknown
  modified_base (162): a, t, c, g, other or unknown
  modified_base (165): a, t, c, g, other or unknown
  modified_base (213): a, t, c, g, other or unknown
  modified_base (233): a, t, c, g, other or unknown
  modified_base (237): a, t, c, g, other or unknown
  modified_base (254): a, t, c, g, other or unknown
accctggagatggacctgttcgggcagcaacagcttgttttggatttcccaaatctttcctcagtggtcttcatgaatttcccctcaacaaagtaaaaagtctcctcaatggaacattttctgctgaaatgctatcctnagagcctaaagacngcacttcanttnaagaaagtaatggtgagcttgagaaagagattgctgagcaagcggatnaggacagcattgcagaccgnccanagagcaaccgcaaaacng

SEQ ID NO: 803 - DNA, 255 bp, Rattus sp.
  modified_base (1): a, t, c, g, other or unknown
  modified_base (10): a, t, c, g, other or unknown
  modified_base (22): a, t, c, g, other or unknown
  modified_base (43): a, t, c, g, other or unknown
  modified_base (62): a, t, c, g, other or unknown
  modified_base (68): a, t, c, g, other or unknown
  modified_base (84): a, t, c, g, other or unknown
  modified_base (89): a, t, c, g, other or unknown
  modified_base (116): a, t, c, g, other or unknown
  modified_base (129): a, t, c, g, other or unknown
  modified_base (159): a, t, c, g, other or unknown
  modified_base (170): a, t, c, g, other or unknown
  modified_base (174): a, t, c, g, other or unknown
  modified_base (176): a, t, c, g, other or unknown
  modified_base (180): a, t, c, g, other or unknown
  modified_base (200): a, t, c, g, other or unknown
  modified_base (205)..(206): a, t, c, g, other or unknown
  modified_base (210): a, t, c, g, other or unknown
  modified_base (214): a, t, c, g, other or unknown
  modified_base (219): a, t, c, g, other or unknown
  modified_base (223): a, t, c, g, other or unknown
  modified_base (228): a, t, c, g, other or unknown
  modified_base (233): a, t, c, g, other or unknown
  modified_base (245): a, t, c, g, other or unknown
  modified_base (247): a, t, c, g, other or unknown
  modified_base (254): a, t, c, g, other or unknown
ncttcttcanataacagagggnatcctgtgcacactgcaatgntagcactgcctccataaancatcanttaagaaaggcccaanagtangatgctgtttcttttaaaataatttanaatatattaactntcctaaggcagattttgtgtgaggcggtgntgaataggtanctgntnccgntgccaaagaacggcgcttgnaaggnnctgnctgntctgnacanttgangcggngggtaaatcccntnaggcacnc

SEQ ID NO: 804 - DNA, 114 bp, Rattus sp.
ggagtctggctgttttgggagccggtgtggcctcgggatttttgtatttctatttccgagatcctggaaaggagatcacctggaaacactttgtgcagtattacctggcccgag

SEQ ID NO: 805 - DNA, 255 bp, Rattus sp.
  modified_base (1): a, t, c, g, other or unknown
  modified_base (5): a, t, c, g, other or unknown
  modified_base (11): a, t, c, g, other or unknown
  modified_base (14): a, t, c, g, other or unknown
  modified_base (21)..(22): a, t, c, g, other or unknown
  modified_base (30): a, t, c, g, other or unknown
  modified_base (33): a, t, c, g, other or unknown
  modified_base (60): a, t, c, g, other or unknown
  modified_base (67)..(68): a, t, c, g, other or unknown
  modified_base (73): a, t, c, g, other or unknown
  modified_base (75)..(78): a, t, c, g, other or unknown
  modified_base (91): a, t, c, g, other or unknown
  modified_base (97): a, t, c, g, other or unknown
  modified_base (105): a, t, c, g, other or unknown
  modified_base (110): a, t, c, g, other or unknown
  modified_base (138): a, t, c, g, other or unknown
  modified_base (151): a, t, c, g, other or unknown
  modified_base (159): a, t, c, g, other or unknown
  modified_base (162): a, t, c, g, other or unknown
  modified_base (164): a, t, c, g, other or unknown
  modified_base (166)..(167): a, t, c, g, other or unknown
  modified_base (169): a, t, c, g, other or unknown
  modified_base (171): a, t, c, g, other or unknown
  modified_base (175): a, t, c, g, other or unknown
  modified_base (178): a, t, c, g, other or unknown
  modified_base (180)..(184): a, t, c, g, other or unknown
  modified_base (186): a, t, c, g, other or unknown
  modified_base (195): a, t, c, g, other or unknown
  modified_base (199): a, t, c, g, other or unknown
  modified_base (211): a, t, c, g, other or unknown
  modified_base (218): a, t, c, g, other or unknown
  modified_base (221): a, t, c, g, other or unknown
  modified_base (224): a, t, c, g, other or unknown
  modified_base (226): a, t, c, g, other or unknown
  modified_base (236)..(237): a, t, c, g, other or unknown
  modified_base (241): a, t, c, g, other or unknown
  modified_base (252): a, t, c, g, other or unknown
ntatntgtttntangatttcnngagatttntgngaggatttacttgctgacttgtatttntttttcnntgatncnnnntggagaagaattntatcangtctttgngaatnccttaccacattgggaatattgtctcangctctttgaatgngtgttggnttntnannantnttgnctngnnnnnangattttagngatncgttgcctttancgagatnggnttncntgggtcttannttgnaccggaattancca

SEQ ID NO: 806 - DNA, 255 bp, Rattus sp.
  modified_base (3)..(5): a, t, c, g, other or unknown
  modified_base (7): a, t, c, g, other or unknown
  modified_base (12): a, t, c, g, other or unknown
  modified_base (16): a, t, c, g, other or unknown
  modified_base (26)..(27): a, t, c, g, other or unknown
  modified_base (30): a, t, c, g, other or unknown
  modified_base (37)..(38): a, t, c, g, other or unknown
  modified_base (52): a, t, c, g, other or unknown
  modified_base (54): a, t, c, g, other or unknown
  modified_base (59): a, t, c, g, other or unknown
  modified_base (62): a, t, c, g, other or unknown
  modified_base (65): a, t, c, g, other or unknown
  modified_base (70): a, t, c, g, other or unknown
  modified_base (105): a, t, c, g, other or unknown
  modified_base (109): a, t, c, g, other or unknown
  modified_base (123): a, t, c, g, other or unknown
  modified_base (134): a, t, c, g, other or unknown
acnnnantgtgngttnctggctttgnntcnaaactgnnactcatgaaggtgncnctggncanacnatatnacgaatggacgccttcaaaaatgtccccacacagnccanggtggcctaccggnactgggtcatntgtgcggatttgtatcctacaggtttgggtttctctggagaccccactgggctggaaacaggcgtctagaaacgcatctgtctgggcagctatggatgaagtgaccttagagctgggcacc

SEQ ID NO: 807 - DNA, 255 bp, Rattus sp.
  modified_base (175): a, t, c, g, other or unknown
gcaagcctcttgttcagacagttgaatgtggctcccaggaggcccccaatgacccccatcacgacgaagaaacccaaatccatagctgtccagagatgacattttttatcagagtcagagcacttaaattcaccaaagttcagcagtccaggcagctggaaggcaccccaacttncaaactggatcccagagcggaagaagttgagggtgaaggtggcagacatggaacagaagagcactttccacgtgagtccc

SEQ ID NO: 808 - DNA, 255 bp, Rattus sp.
  modified_base (12): a, t, c, g, other or unknown
  modified_base (70): a, t, c, g, other or unknown
  modified_base (122): a, t, c, g, other or unknown
  modified_base (245): a, t, c, g, other or unknown
accaggtccctngggagttggcgggtcagcctgtgcacttgaagcgtgacttcttcctggccaatgcttntcgggcacaatcagagcactttatcaaccttcgagaggtcagtaaccgcatncgcctgccgccgggggagtatatagtggtgccctccaccttcgagcccaacaaagagggtgactttctgctgcgcttcttttcagagaagaaggctgggacccaggaactagatgaccagatncaggccaacc

SEQ ID NO: 809 - DNA, 255 bp, Rattus sp.
agctgagagtagctttcagccttccactcacagagctccctgagatagagcccaggtcctggagcatctgctgccacacataagacacacccagctctctctcacagatcctatcctgtgggtgttgagagcagaggagcagctacaagaatcagtattgtgggtcattccagtgtttattgtaaaatgcaagtgagtgccatttaaccccatgattctaatgtctgctgaacgaccagacagggcatatcccag

SEQ ID NO: 810 - DNA, 255 bp, Rattus sp.
  modified_base (6): a, t, c, g, other or unknown
  modified_base (22): a, t, c, g, other or unknown
  modified_base (33): a, t, c, g, other or unknown
  modified_base (45): a, t, c, g, other or unknown
  modified_base (61): a, t, c, g, other or unknown
  modified_base (66): a, t, c, g, other or unknown
  modified_base (78): a, t, c, g, other or unknown
  modified_base (86): a, t, c, g, other or unknown
  modified_base (107): a, t, c, g, other or unknown
  modified_base (147): a, t, c, g, other or unknown
  modified_base (149): a, t, c, g, other or unknown
  modified_base (160): a, t, c, g, other or unknown
  modified_base (166): a, t, c, g, other or unknown
  modified_base (168)..(170): a, t, c, g, other or unknown
  modified_base (177): a, t, c, g, other or unknown
  modified_base (184): a, t, c, g, other or unknown
  modified_base (186): a, t, c, g, other or unknown
  modified_base (190)..(191): a, t, c, g, other or unknown
  modified_base (193): a, t, c, g, other or unknown
  modified_base (195)..(197): a, t, c, g, other or unknown
  modified_base (200)..(202): a, t, c, g, other or unknown
  modified_base (204): a, t, c, g, other or unknown
  modified_base (217): a, t, c, g, other or unknown
  modified_base (219): a, t, c, g, other or unknown
  modified_base (221)..(222): a, t, c, g, other or unknown
  modified_base (224): a, t, c, g, other or unknown
  modified_base (226): a, t, c, g, other or unknown
  modified_base (236): a, t, c, g, other or unknown
  modified_base (240): a, t, c, g, other or unknown
  modified_base (247): a, t, c, g, other or unknown
  modified_base (250): a, t, c, g, other or unknown
  modified_base (252): a, t, c, g, other or unknown
ttagcnttttcgcggccgaggnacgcccactgntgggggggcctntgaaggggaaggtttngggcngacatcacaggncccttccnggggccccactggccagctgnagagagcacaggctactacgtcaggctgtgtgaggttttnanttgctgccttnccttangnnnataaganctggacnanaggnncncnnnagnnngntaaagaaactggntnanngncntcgaaccaangctnaaattgngcntntga

SEQ ID NO: 811 - DNA, 255 bp, Rattus sp.
  modified_base (127): a, t, c, g, other or unknown
  modified_base (136): a, t, c, g, other or unknown
atccagtgcccatggatgcgggtttttggttttgttcaggctgtgagaagttacacgctggtcagctgacttttcttttctgagagaatcacctctcaaatgctttcctgtgctccctgagggcctnctggctggntgcaggtttctggtttactggtgttctgggctggctggtgtcctgttatcacttgatagaaagaatagaaaatgtttctactcttaccctgctagcgttgagtagtgttaaatcctata

SEQ ID NO: 812 - DNA, 255 bp, Rattus sp.
  modified_base (100): a, t, c, g, other or unknown
  modified_base (108): a, t, c, g, other or unknown
  modified_base (132): a, t, c, g, other or unknown
  modified_base (144): a, t, c, g, other or unknown
  modified_base (151): a, t, c, g, other or unknown
  modified_base (197): a, t, c, g, other or unknown
  modified_base (213): a, t, c, g, other or unknown
  modified_base (215): a, t, c, g, other or unknown
  modified_base (227): a, t, c, g, other or unknown
acaagctttttttttcttttttttttttttttttttttaccttaaatatgtaacttttattatgaacatgaagcatgtatgtttattagcactgactttncctaaggncaacaacctcaaccaccatatggnccctatctccgncctctgnatgctgacacaatcacatgatgaatcaggacggctgtaagagctgnatctgataacttcagngnaaacaacaatgngttatatttggatttttattaaatcaag

SEQ ID NO: 813 - DNA, 175 bp, Rattus sp.
gattggggcggcccagcctgtggggtcgggacacgagtctcacgtgtttctgtagtttgtaaacagtcatgcagacgggttctgggttttctcacagggtgtaaggtccaggctgtccattcaggtggagagggataaaggagaagatgtggtcacttctgtgtgctaaggacgt

SEQ ID NO: 814 - DNA, 255 bp, Rattus sp.
  modified_base (39): a, t, c, g, other or unknown
  modified_base (115): a, t, c, g, other or unknown
  modified_base (131): a, t, c, g, other or unknown
  modified_base (134): a, t, c, g, other or unknown
  modified_base (150): a, t, c, g, other or unknown
  modified_base (152): a, t, c, g, other or unknown
  modified_base (173): a, t, c, g, other or unknown
  modified_base (175): a, t, c, g, other or unknown
  modified_base (201): a, t, c, g, other or unknown
  modified_base (209): a, t, c, g, other or unknown
ttagctgtggtcgcggccgaggtacttaatagatgtttncaaagctgggtccagttagtgttatgtcttggatcttgcagatagactagatctcaaaagcttgcccctttgctgnagcaggaataatggtnggntctatctactggacancngtgacttatggagcagtgacngngatgcaggttgtaggccataaagaanggctggangttatggagccgagctgaccctttatttcttttgattggacttcct

SEQ ID NO: 815 - DNA, 255 bp, Rattus sp.
atggagaagtttgcctcctactgcctcactgaaccaggaagtgggagtgatgctgcatctctcctgacctcagctaagcgacaaggagatcattacatcctcaacggctccaaggccttcatcagtgggggaggtgagtcagacgtctatgtggtcatgtgcagaactggtggatcaggccccaaaggtatctcctgcatagttgttgagaaaggaacccctggcctcagctttggcaagaaggagaagaaggtg

SEQ ID NO: 816 - DNA, 255 bp, Rattus sp.
acttcttcaaataacagaggggatcctgtgcacactgcaatgttagcactgcctccataaagcatcaattaagaaaggcccaagagtaggatgctgtttcttttaaaataatttaaaatatattaactttcctaaggcagattttgtgtgaggcgtgttgaataggtagctgctaccgctgccaaagaacggtgcttggaaggggctgtctgttctgggcagttggagttggagggtaaatcccgtgaggtcaag

SEQ ID NO: 817 - DNA, 255 bp, Rattus sp.
acttgagttatttgggtttgttcacctgtttccagagatttttggtcttttgggcagaagcccattgaccagactgtgggccatcttagtctgcatggagaggtggcagccggagtggttgtggccctggctaccaagcccctgacagcccgttaccaggaggatggtggttttgactttcttcactcaaaaccagtgcagttgacacagtggctgctggttcactgtcccatgaaactgcttctggtgtggtgc

SEQ ID NO: 818 - DNA, 255 bp, Rattus sp.
actcggcttccttgctttagggatggctcacccacctcctctgttccgaaactctcaggggagctgctctcctgaagcacgagctccacaccgcttggtgggagaggagcctccgggtcctctgagagcttctcctcatcctcctcatgaatgggagatgatggagaccgcagggtgctgtctggagacttgctctgtgtcttgcccttctgtattccattttctatgattcgatcgagtccagcaaggggacaa

SEQ ID NO: 819 - DNA, 255 bp, Rattus sp.
  modified_base (115): a, t, c, g, other or unknown
  modified_base (151): a, t, c, g, other or unknown
  modified_base (198): a, t, c, g, other or unknown
  modified_base (252): a, t, c, g, other or unknown
  modified_base (254): a, t, c, g, other or unknown
acattctatggagtgaccagcagcagcaacaggagggtcagttctccttccagaacctataaaaccccagtgctatcgccaagcaagtgaacaccgaggctgtgaaaagaaacanactatgttacaagccataccttaattatttcagacnataaaaaaaaatgaacagaaacagaaaatcaaacttttatctcatgntctttttccctagaaaattaaactaagaataaaaggcatttgtaaaggcaatangnt

SEQ ID NO: 820 - DNA, 255 bp, Rattus sp.
actttgaatacagcgatgcccacaaagtgcaaaatacaaagataactgcattccattgcagcactgttccaacacccctctgagtcaaatatgggcatgacagttgtttagatgcacgaaactaccttgaaaaatgctaccagaaactatgtcgggtgtgataacgagtgttaaactctgctaaaaagagcctgtcacatttgccacagcataaaaatcaccttggtcaaggacaggcacatgagtgaggcctcg

SEQ ID NO: 821 - DNA, 255 bp, Rattus sp.
  modified_base (14): a, t, c, g, other or unknown
cgccgggcccgagngtacctctcaacccctgacagtcagtctctgcgctgtgacctcattcgatacatctgtggggtaagtccacccctctaacgaagtgctgagttctgatatcttgccccgatgggccatcattggctggctcctgacaacatgcacgtccaatgttgctgcctccaatgccaagctggctttgttttatgactggctgttcttcagcccagacaaggatagcattatgaacatagagccagc

SEQ ID NO: 822 - DNA, 255 bp, Rattus sp.
  modified_base (1)..(8): a, t, c, g, other or unknown
  modified_base (19): a, t, c, g, other or unknown
  modified_base (189): a, t, c, g, other or unknown
nnnnnnnntccgggcttanccgttggtccgccggcccgaggtacacccggaccgctggaagcctctggaggtgttacttggtgtggccacaagctcataagctggagaaacccacctctggagatgtcaggtaggaagctgaactgttctggcttcagctggattcgaaagtaagttcttatagattgnttctgtgagagactttctcctgcagtaggacgaccacggttggggctccaggaccagaatgccccc

SEQ ID NO: 823 - DNA, 255 bp, Rattus sp.
  modified_base (13): a, t, c, g, other or unknown
  modified_base (32): a, t, c, g, other or unknown
  modified_base (46): a, t, c, g, other or unknown
  modified_base (59): a, t, c, g, other or unknown
  modified_base (77): a, t, c, g, other or unknown
  modified_base (87)..(88): a, t, c, g, other or unknown
  modified_base (98)..(99): a, t, c, g, other or unknown
  modified_base (103): a, t, c, g, other or unknown
  modified_base (105): a, t, c, g, other or unknown
  modified_base (107): a, t, c, g, other or unknown
  modified_base (109): a, t, c, g, other or unknown
  modified_base (116): a, t, c, g, other or unknown
  modified_base (118)..(119): a, t, c, g, other or unknown
  modified_base (121)..(122): a, t, c, g, other or unknown
  modified_base (126): a, t, c, g, other or unknown
  modified_base (128): a, t, c, g, other or unknown
  modified_base (133): a, t, c, g, other or unknown
  modified_base (149): a, t, c, g, other or unknown
  modified_base (151): a, t, c, g, other or unknown
  modified_base (159): a, t, c, g, other or unknown
  modified_base (173): a, t, c, g, other or unknown
  modified_base (175): a, t, c, g, other or unknown
  modified_base (178): a, t, c, g, other or unknown
  modified_base (187): a, t, c, g, other or unknown
  modified_base (190): a, t, c, g, other or unknown
  modified_base (192)..(193): a, t, c, g, other or unknown
  modified_base (229): a, t, c, g, other or unknown
acacttcttacanggcgacttctagatctacnatgatgtcactttntcttggaatattnctgtcctgctgactaggngcttctccanncatgaacccnnaatntncnangaagtgngnnannatgncnccgtnggagctctgatgcccntntttcaagncttcttcaccatangnatnatactgttntcngnnttcactatctgacagaacctcataagcagcacccanatcctgtaattgtctcctgggctagg

SEQ ID NO: 824 - DNA, 255 bp, Rattus sp.
  modified_base (6): a, t, c, g, other or unknown
  modified_base (13): a, t, c, g, other or unknown
  modified_base (130): a, t, c, g, other or unknown
  modified_base (221): a, t, c, g, other or unknown
accaanctctgtntctgggcttctcttgagtcaagattccatttatgggcctctgtcagactggtcttctggtcgccagactccccagggctcagtctgctttccaatacctcttttctcttgggactgngatctccagaacctgctaatctcagattctcctctggagtttctccagggctcagcctccatttctgagcctcagctggtctggaatccangtctctggcctctgctgggctctgcctccagtct

SEQ ID NO: 825 - DNA, 255 bp, Rattus sp.
aggtacaccattgagaacccaaggcactttgtggactcacaccaccagaagcctgtcaatgctatcattgagcatgttcgagacggcagtgtggtccgggccctgctccttccggatcactaccttgttaccgtcatgctgtcagggattaagtgcccaacctttcgtcgagaaacagatggtagtgaaacaccagagcccttcgctgcagaagccaagtttttcacggagtctcgactgcttcagagagatgtt

SEQ ID NO: 826 - DNA, 255 bp, Rattus sp.
  modified_base (12): a, t, c, g, other or unknown
  modified_base (95): a, t, c, g, other or unknown
  modified_base (130): a, t, c, g, other or unknown
  modified_base (170): a, t, c, g, other or unknown
  modified_base (183): a, t, c, g, other or unknown
  modified_base (185): a, t, c, g, other or unknown
  modified_base (205): a, t, c, g, other or unknown
  modified_base (210): a, t, c, g, other or unknown
  modified_base (223): a, t, c, g, other or unknown
  modified_base (236): a, t, c, g, other or unknown
  modified_base (238): a, t, c, g, other or unknown
accaagctctgnttctgggcttctcttgagtcaagattccatttatgggcctctgtcagactggtcttctggtcgccagactccccagggctcantctgctttccaatacctcttttctcttgggactgngatctccagaacctgctaatctcagattctcctctggagnttcttcagggctnancctccatttctgagcctcanctggnctggaatcaaggnctctgggctctgntnggctttggcctccagtc

SEQ ID NO: 827 - DNA, 255 bp, Rattus sp.
acatgtaaatgactgtttcttaaccgcaacttaactaccgagcaaaaaatttataaagctgccaaaaaccaaaaagcaaacaaacaaaaaccagctttcagcattacattctgggaaactgaagtgcttgatcttattcaaagttttagttctcttttttagttactacaatactgataaacaggatatactttatatggatcagatagccaggatataattcttgtatgtgaatactttcattaaagcaaaaga

SEQ ID NO: 828 - DNA, 255 bp, Rattus sp.
accagcgcaaagcaggcttcctggtgttggccgtattatctgacggtgctggtgaccacatcagacaaagactgctatacccactgctgcagatcgtgtgcaagggcctggatgacccctcacaggttgttcgaaatgctgctctgtttgccctgggccagttttcagagaacttacagccccatatcagcagctattccgaggaggtaatgcccctgctccttacctacctgaagtcaagtgcctatgggaaac

SEQ ID NO: 829 - DNA, 255 bp, Rattus sp.
  modified_base (61): a, t, c, g, other or unknown
  modified_base (64): a, t, c, g, other or unknown
  modified_base (66)..(67): a, t, c, g, other or unknown
  modified_base (74)..(76): a, t, c, g, other or unknown
  modified_base (78): a, t, c, g, other or unknown
  modified_base (81): a, t, c, g, other or unknown
  modified_base (87): a, t, c, g, other or unknown
  modified_base (89): a, t, c, g, other or unknown
  modified_base (94)..(95): a, t, c, g, other or unknown
  modified_base (102): a, t, c, g, other or unknown
  modified_base (106): a, t, c, g, other or unknown
  modified_base (111): a, t, c, g, other or unknown
  modified_base (113): a, t, c, g, other or unknown
  modified_base (117): a, t, c, g, other or unknown
  modified_base (121): a, t, c, g, other or unknown
  modified_base (131)..(132): a, t, c, g, other or unknown
  modified_base (134): a, t, c, g, other or unknown
  modified_base (142): a, t, c, g, other or unknown
  modified_base (148)..(149): a, t, c, g, other or unknown
  modified_base (154): a, t, c, g, other or unknown
  modified_base (163): a, t, c, g, other or unknown
  modified_base (171)..(172): a, t, c, g, other or unknown
  modified_base (180): a, t, c, g, other or unknown
  modified_base (190): a, t, c, g, other or unknown
  modified_base (197): a, t, c, g, other or unknown
  modified_base (203): a, t, c, g, other or unknown
  modified_base (205)..(206): a, t, c, g, other or unknown
  modified_base (209): a, t, c, g, other or unknown
  modified_base (216): a, t, c, g, other or unknown
  modified_base (220): a, t, c, g, other or unknown
  modified_base (229): a, t, c, g, other or unknown
  modified_base (233): a, t, c, g, other or unknown
  modified_base (239): a, t, c, g, other or unknown
  modified_base (242): a, t, c, g, other or unknown
  modified_base (253): a, t, c, g, other or unknown
caagcttttttttttttttttttttttttttttttttttttttttttttttggcctacttnacnannccctttnnncntcncacctnanccacnnctgatcntctncactncngatnatcncgtgccttgnncntgaggtcncctcannagttntacgtaatnctcctctnnttgccccngaaccacctnttcagantacttncnnccncatatcntcanctattcccntgtnggtaantgnccctgcttccnta

SEQ ID NO: 830 - DNA, 255 bp, Rattus sp.
accatgtcccagagagcatcttggttttgttcattttttatgagtttaatcagattttcttaatcaggaaggctccttgggaccttcatagtaagctgaagctgctcttctcctcacctgagtgttgatttcaggtcaatggccggcaccctcccttccctcttactgttgaagtctctgaacctgtggttctcaagtggagcggcacaaagccaaggcaccagcgcatttcagtagcaggatatatccatctta

SEQ ID NO: 831 - DNA, 255 bp, Rattus sp.
  modified_base (79): a, t, c, g, other or unknown
  modified_base (84): a, t, c, g, other or unknown
  modified_base (100): a, t, c, g, other or unknown
  modified_base (142): a, t, c, g, other or unknown
  modified_base (154): a, t, c, g, other or unknown
  modified_base (169): a, t, c, g, other or unknown
  modified_base (183): a, t, c, g, other or unknown
  modified_base (222): a, t, c, g, other or unknown
  modified_base (229): a, t, c, g, other or unknown
  modified_base (246): a, t, c, g, other or unknown
acaagcttttttttttttttttttttttttttttttttttttttttgaggggacaacatgtcaatttattaaaaaaagngtaanatttcaatctgttaanatttgacttgtaagctttttacacatttcgatttttttcaanatttaaaaaacncaaggaaaatgaaanaattttttttccanaccactttatctgaatcactgaaattaaatgaagcctgnggcctanactcaggggcctaaatngttttttga

SEQ ID NO: 832 - DNA, 255 bp, Rattus sp.
acaacatgctgaacgcggacactacccgccacctcatggtctgctttctgtggatcatgaaaaacgcggatcagagcctcatcaggaagtggatcgccgacctgccttccatgcagctcaacaggattctagacctgctgttcatctgtgtctcctgctttgaatacaagggaaagcagagttctgacaaagtcagtaaccaggtcctgcagaagtcaagagatgtcaaggccaagttggaagaagccctgctcc

SEQ ID NO: 833 - DNA, 255 bp, Rattus sp.
  modified_base (8): a, t, c, g, other or unknown
  modified_base (169): a, t, c, g, other or unknown
  modified_base (214): a, t, c, g, other or unknown
accaaagntctatatatacctttgctaaagacacttaagcgtgactttccggggagaagcccacactgatgcttgggtctatctcacccctgtcccggacacctctctatcgactgccatgctttagatctaagtgaaaaatggccttttagtaaatctccaattctgnttcacattgtctgtccatgaaattcttttctctgtcaaagccganggtcctagtgcctccgtctgcgttgcccacaaccgcgtgag

SEQ ID NO: 834 - DNA, 255 bp, Rattus sp.
accaagctctgtttctgggcttctcttgagtcaagattccatttatgggcctctgtcagactggtcttctggtcgccagactccccagggctcagtctgctttccaatacctcttttctcttgggactgtgatctccagaacctgctaatctcagattctcctctggagtttctccagggctcagcctccatttctgagcctcagctggtctggaatccaggtctctggcctctgctgggctctgcttcagtctc

SEQ ID NO: 835 - DNA, 255 bp, Rattus sp.
  modified_base (23): a, t, c, g, other or unknown
  modified_base (32)..(33): a, t, c, g, other or unknown
  modified_base (45): a, t, c, g, other or unknown
  modified_base (73): a, t, c, g, other or unknown
  modified_base (78): a, t, c, g, other or unknown
  modified_base (132): a, t, c, g, other or unknown
  modified_base (140)..(141): a, t, c, g, other or unknown
  modified_base (145): a, t, c, g, other or unknown
  modified_base (177): a, t, c, g, other or unknown
  modified_base (186): a, t, c, g, other or unknown
acctcgaggaaaagttctccttnagctggcanngctccctgcacnggtgtcttttgatttcattcttcctttntaatncacgctaaatgaccacctctattgatagagacctgccccttcagtctgttcctnaggactgnntaancatccaggctatgcctgccagagcctacatgntcaggctgnctgggaatgagcacccagctctggcccagtccctgaatcatgtggcctgagggaaagcactggcctcca

SEQ ID NO: 836 - DNA, 255 bp, Rattus sp.
  modified_base (1): a, t, c, g, other or unknown
  modified_base (7): a, t, c, g, other or unknown
  modified_base (13)..(14): a, t, c, g, other or unknown
  modified_base (18)..(20): a, t, c, g, other or unknown
  modified_base (22): a, t, c, g, other or unknown
  modified_base (27)..(28): a, t, c, g, other or unknown
  modified_base (42): a, t, c, g, other or unknown
  modified_base (45): a, t, c, g, other or unknown
  modified_base (50): a, t, c, g, other or unknown
  modified_base (52): a, t, c, g, other or unknown
  modified_base (55)..(58): a, t, c, g, other or unknown
  modified_base (117): a, t, c, g, other or unknown
  modified_base (133): a, t, c, g, other or unknown
  modified_base (182): a, t, c, g, other or unknown
  modified_base (220): a, t, c, g, other or unknown
  modified_base (224): a, t, c, g, other or unknown
  modified_base (230): a, t, c, g, other or unknown
nccaaanaagccnngagnnntngctcnnatctgcttgatctntgncttgntncannnngtggaccacgatgaacactctaattctgacagtgtcccacctggctatgagcccatctncttgctcgaggcactnaatggactacgggctgtctccccagctatcccatcggctcccctctatnaggaaatcacctactcaggcatcttcagacggtctttnccangccagntgtcccttgctggactcgatcgaat

SEQ ID NO: 837 - DNA, 255 bp, Rattus sp.
  modified_base (12)..(13): a, t, c, g, other or unknown
  modified_base (85): a, t, c, g, other or unknown
  modified_base (115): a, t, c, g, other or unknown
  modified_base (150): a, t, c, g, other or unknown
  modified_base (162): a, t, c, g, other or unknown
  modified_base (190): a, t, c, g, other or unknown
acatgcatttgnnacagacgacccaccattatcatcagactttcctacaactaccgcctgccatggtggaagaaggtgaggaggntcatgagccaagaaacagaaatggaagcanaagaggaaactgggtctgttcaagctaacctcacncccagtccaacngatgccagcctgagtcaagagaccccancttctcagcctgactgctccaatcagacggaggctgcctccagtcacacagaagatacctctgct

SEQ ID NO: 838 - DNA, 255 bp, Rattus sp.
  modified_base (15): a, t, c, g, other or unknown
  modified_base (27): a, t, c, g, other or unknown
  modified_base (44): a, t, c, g, other or unknown
  modified_base (76): a, t, c, g, other or unknown
  modified_base (81): a, t, c, g, other or unknown
  modified_base (112): a, t, c, g, other or unknown
  modified_base (115): a, t, c, g, other or unknown
  modified_base (118): a, t, c, g, other or unknown
  modified_base (133): a, t, c, g, other or unknown
  modified_base (137): a, t, c, g, other or unknown
  modified_base (148): a, t, c, g, other or unknown
  modified_base (162): a, t, c, g, other or unknown
  modified_base (168): a, t, c, g, other or unknown
aaatacgcagctttntcacaggtcggnatcgcgaggcaatccanggtgggaagtccggtaagtcttaatgctgggntctgntaaaactgaaggactaagcaggcagttaccnaanttncggcttgagcactgngagncttcacatttncccgaatcactcanaaaagnataacattccctttttcttggtttacttacagaatctggccaaaagctaagctcacttttcctgatgcttcaggcttctcacaggtt

SEQ ID NO: 839 - DNA, 255 bp, Rattus sp.
  modified_base (5)..(6): a, t, c, g, other or unknown
  modified_base (9): a, t, c, g, other or unknown
  modified_base (26): a, t, c, g, other or unknown
  modified_base (44): a, t, c, g, other or unknown
  modified_base (88)..(89): a, t, c, g, other or unknown
  modified_base (111): a, t, c, g, other or unknown
  modified_base (123): a, t, c, g, other or unknown
  modified_base (128): a, t, c, g, other or unknown
  modified_base (137): a, t, c, g, other or unknown
  modified_base (141): a, t, c, g, other or unknown
  modified_base (153): a, t, c, g, other or unknown
  modified_base (155): a, t, c, g, other or unknown
  modified_base (162): a, t, c, g, other or unknown
  modified_base (173)..(174): a, t, c, g, other or unknown
  modified_base (179): a, t, c, g, other or unknown
  modified_base (210): a, t, c, g, other or unknown
actannttnagagacattaggagttncatccataattcgactanagccatttggggcattatgggtggatgcacttgcccacactggnnttactccatatttattctgcangaatgccttgtnttggncactgtcantgantctgcctgtggncngcagatnctggggcttanncacantcttccaagtgtcgttaagtaatagcaaatnttccagatcattggctgtgaactttttgcctggaattcctgagac

SEQ ID NO: 840 - DNA, 255 bp, Rattus sp.
  modified_base (181): a, t, c, g, other or unknown
  modified_base (222): a, t, c, g, other or unknown
  modified_base (228): a, t, c, g, other or unknown
acatcagaaccgattcatccaacaggagcgacagcaggcagcagcagcagcagcagcagcagcagcagcagcagctgaaacgaggtgcttggtgataggaaggctgggcctctggaggctctagaacggagatcaagtcctggtaatttaagagatcagagccctaagggaagagagtcangagaagagaggctaagtcccagggaggccagagataggaangctggncgataggaggaacccaaagagtcaagt

SEQ ID NO: 841 - DNA, 112 bp, Rattus sp.
  modified_base (39): a, t, c, g, other or unknown
  modified_base (44)..(47): a, t, c, g, other or unknown
  modified_base (67): a, t, c, g, other or unknown
  modified_base (100): a, t, c, g, other or unknown
  modified_base (109)..(110): a, t, c, g, other or unknown
acaagcttttttttttttttttttttttttttttttatnaattnnnntttaatttatttaaaagcanaaaggtaaaggaagaagagacacaagagggganagacctganngt

SEQ ID NO: 842 - DNA, 255 bp, Rattus sp.
  modified_base (209): a, t, c, g, other or unknown
  modified_base (245): a, t, c, g, other or unknown
  modified_base (253): a, t, c, g, other or unknown
acactctaggactacggaaccacctggcaaggcctctgcagaaactcagtccagtggctttcccgtgaatacattctcaaagcaggagataaggcggtgctggaaggtgagacgctgaacctgtgcacagacacagccccagacaccctggccacaagggcagaggctcgagtagcagcccgggtgcatgtggtggatggtgctttggnagcagctagacagtgaaagtcaggaaaggcctcggnaccacgtnac

SEQ ID NO: 843 - DNA, 255 bp, Rattus sp.
accttttaacttaatgttccagaccttcattgggcctggaggaaacatgcctggatatctgagaccagaaactgcacagggaattttcctaaatttcaaacgacttttggaattcaaccaagggaagttgccttttgctgctgcacagattggaaactcctttagaaatgagatctcgccccggtctggactgatccgagtcagggaattcacaatggcagagatcgagcactttgtagatcccactgagaaaga

SEQ ID NO: 844 - DNA, 255 bp, Rattus sp.
  modified_base (22): a, t, c, g, other or unknown
  modified_base (36): a, t, c, g, other or unknown
  modified_base (115): a, t, c, g, other or unknown
  modified_base (129): a, t, c, g, other or unknown
acattgaagagctggccaggancgtgcccctgcctnccctcatcatgaactgcaggacgatcatggaggagatcatggaggtggttgggctggaggagcaggggcagaattttgngcggcataccccanaaggccaggaagccccagatagggatgaggtatacacaatccccaactctctgaagcgaagtgagtccccacagctgactcagatgctttgtcattgcatgaacagcctcagcagattgccatcaa

SEQ ID NO: 845 - DNA, 255 bp, Rattus sp.
  modified_base (220): a, t, c, g, other or unknown
accaccttctcccccgtggagctgaccttgctattgttggcacagacggtagcttctgaggcttttggcagcaccgcttccgggcccttgccttgtgtttcactgtcctcagctaggccctctctggaagctgtgggagcagcctctgaggcactagctcctgatgaagttccacggataggggccaccatatgggctgcctttgcctcagctctattgncgagtagccaactctgagtgcctgctttcccatat

SEQ ID NO: 846 - DNA, 255 bp, Rattus sp.
  modified_base (2): a, t, c, g, other or unknown
  modified_base (5): a, t, c, g, other or unknown
  modified_base (9)..(10): a, t, c, g, other or unknown
  modified_base (26): a, t, c, g, other or unknown
  modified_base (36): a, t, c, g, other or unknown
  modified_base (39): a, t, c, g, other or unknown
  modified_base (42): a, t, c, g, other or unknown
  modified_base (48): a, t, c, g, other or unknown
  modified_base (52): a, t, c, g, other or unknown
  modified_base (56): a, t, c, g, other or unknown
  modified_base (63): a, t, c, g, other or unknown
  modified_base (73): a, t, c, g, other or unknown
  modified_base (76): a, t, c, g, other or unknown
  modified_base (106)..(107): a, t, c, g, other or unknown
  modified_base (114): a, t, c, g, other or unknown
  modified_base (122): a, t, c, g, other or unknown
  modified_base (128): a, t, c, g, other or unknown
  modified_base (130)..(131): a, t, c, g, other or unknown
  modified_base (135): a, t, c, g, other or unknown
  modified_base (141): a, t, c, g, other or unknown
  modified_base (143): a, t, c, g, other or unknown
  modified_base (146): a, t, c, g, other or unknown
  modified_base (156)..(157): a, t, c, g, other or unknown
  modified_base (178): a, t, c, g, other or unknown
  modified_base (183)..(185): a, t, c, g, other or unknown
  modified_base (187): a, t, c, g, other or unknown
  modified_base (191): a, t, c, g, other or unknown
  modified_base (198): a, t, c, g, other or unknown
  modified_base (200): a, t, c, g, other or unknown
  modified_base (203)..(205): a, t, c, g, other or unknown
  modified_base (213)..(214): a, t, c, g, other or unknown
  modified_base (220): a, t, c, g, other or unknown
  modified_base (229): a, t, c, g, other or unknown
  modified_base (247): a, t, c, g, other or unknown
tnacntttnntttttttttttgcacntacacacggncanctntattgntcantagnatcaacnccaaacctanagntgaaatctcaccgttatttccatgctgtcnngaacagngacaaagntaaccngnngctncattcngncancagacctaannttttacagctaacttactttnacagnnntngatnaaatagntnccnnntacaatgnncaaggnttttagtcnctaaggaatttaaatggnatcttgaa

SEQ ID NO: 847 - DNA, 255 bp, Rattus sp.
acaccacgagagactgctgcttgtttcgattcttggatttgtggtaaacctagtaggaatatttgttttcaatcatggaggtcacggacattctcacggctctggccatggacacagtcattccctctttaatggtgctctagatcacagccatggccatgaagaccattgccatagtcacggagccaaacatggaggtgcacacagccatgaccatgaccatgctcatggacatgggcacttgcattcccacga

SEQ ID NO: 848 - DNA, 255 bp, Rattus sp.
  modified_base (4): a, t, c, g, other or unknown
  modified_base (8): a, t, c, g, other or unknown
  modified_base (16): a, t, c, g, other or unknown
  modified_base (31): a, t, c, g, other or unknown
  modified_base (33): a, t, c, g, other or unknown
  modified_base (35): a, t, c, g, other or unknown
  modified_base (54): a, t, c, g, other or unknown
  modified_base (78): a, t, c, g, other or unknown
  modified_base (88): a, t, c, g, other or unknown
  modified_base (115): a, t, c, g, other or unknown
  modified_base (122): a, t, c, g, other or unknown
  modified_base (155): a, t, c, g, other or unknown
  modified_base (161): a, t, c, g, other or unknown
  modified_base (182): a, t, c, g, other or unknown
actntttnaacacggngcccatcctatcccngngncgacagacaaagaggcatngcttctggggcccaggctggctgntgactctcangggctgcatgggctgacaaatgatagngaggggngtagtctccccaagtccttgatcctcatactgncgcctncctaacgccccatcgtcaaangcgagtgcgctggatgataccgtattcaagatagaacaggaaccatggaagatccaggtgctacactcatcag

SEQ ID NO: 849 - DNA, 255 bp, Rattus sp.
acacgttgcatctcctagcttcctcctgaaccccgttttacgttcgcggcggggaaaacagcctgacgagtagactgcagctcctgggagatggcggcgctgtgccttacggtgaacgccggaaaccctccactggaagctctgctggcagtggagcatgtgaaaggtgatgtcagcatttctgtggaagaagggaaggagaatcttcttcgggtttctgagagtgtggtgttcactgacacaaattcaatcctg

SEQ ID NO: 850 - DNA, 255 bp, Rattus sp.
  modified_base (45): a, t, c, g, other or unknown
  modified_base (63): a, t, c, g, other or unknown
  modified_base (73): a, t, c, g, other or unknown
  modified_base (91): a, t, c, g, other or unknown
  modified_base (101): a, t, c, g, other or unknown
  modified_base (106): a, t, c, g, other or unknown
  modified_base (166): a, t, c, g, other or unknown
  modified_base (170): a, t, c, g, other or unknown
  modified_base (203): a, t, c, g, other or unknown
  modified_base (214): a, t, c, g, other or unknown
  modified_base (234): a, t, c, g, other or unknown
acaagctttttttttttttttttttttttttttttttttctccanatatttaatgaatttganaatcatgtanccatattccatgaaatgngattacctgnggtgnaggctgaagccctactgaggcaaacaaatgcatcacaagataagtaaaagccttatgcanatgnatttctgttcttacctgctacaatgtagcctgngatgtaatacncagataaataagacagtctnttggatttttctaatttatag

SEQ ID NO: 851 - DNA, 255 bp, Rattus sp.
  modified_base (35): a, t, c, g, other or unknown
  modified_base (39): a, t, c, g, other or unknown
  modified_base (44)..(45): a, t, c, g, other or unknown
  modified_base (49): a, t, c, g, other or unknown
tttcgatcggccgcccgggcaggacctgcggctgngcanagcanntaangccgcggtgtttgagaatgctgctgtttgtgatgaaattgctcgtcttgaggaaaaattccttaaagcaaaggaggaaagaagatacttgctgaagaagctcctccagatccatgctctaactgaaggggaaccacaggctgccgctccttcccacagctccagtttgcccctggcttatggtgtcaccagctctgtgggaaccac

SEQ ID NO: 852 - DNA, 255 bp, Rattus sp.
acctttcccatgcctaccagtggaggcattcagaccagaaaagcaagccagcaagtaacattcttaaggttagagaaagccagttgtgctgctgcataccctgagacaaagagcatcctttgccagatagagagcctgagacaccaggccactctccacaaactagatacatttaaaagttacttggtcaaccaggtgtggtagtgcatgctttagttctagtgcttggactggcagctcgagaccagcatgcac

SEQ ID NO: 853 - DNA, 255 bp, Rattus sp.
acccatgtagaaagggctaaacttccctttgctgaagagaagaaggttatacagagacatcaatgcccaagtcctcaccttcacaatcacatcctagagaacgataagtcagaacagaattgctctggccagggtatttttatgttgacaaaatattgttgcaatatttgaatctccagattgggaatctccaggctgaaattgtttgtgtcagaatttttattttaatgtttcaagaatgaggtagtctacatt

SEQ ID NO: 854 - DNA, 255 bp, Rattus sp.
acccttccagagctgccctacagaaaggagatggtgagagctgatctgattaataagaaagttggaatcaaagagactcctgcaaatcttgccaaactcctgaccaggatgtgtctgaagtcagaagtcataggtgatggcaatcagattgaggttgaaatccctccgaccagagccgatgtcatccatgcgtgtgacattgtggaggacgcagctattgcttatggttataacaacattcagatgactctcccg

SEQ ID NO: 855 - DNA, 255 bp, Rattus sp.
acagacctaaggcgaagtaaaaggattgccagcaaaaaagtttacagggtagaatcaggaaaagcaggctgcttctctcccaaagtcactcgtaaagaaaaggtccgaagatctctccgtctgaaatttagtctgaggaagaacggagattcaaatggatgttctgtcatcaatagacatgaaaatgttggtcgacgactagcgaatcagcagaatctaaaaaataggattgagtctgtaaaaacgggtctgctt

SEQ ID NO: 856 - DNA, 255 bp, Rattus sp.
actagacaaagaagactgatatttactataaagaaaatcccaaccttctgtgctctgggccccaacagcaaacaccgccaaggtcacatcaatagggaggctcatgtttccattggatgccttccactctctgaaatagcgctctgccctctgcacgcagagctgatacctgtgcacacatgctaggagtaagagctggctcctgagcatcctctctgagacagagccttcatctgtccaggtctgcttattaat

SEQ ID NO: 857 - DNA, 222 bp, Rattus sp.
  modified_base (4): a, t, c, g, other or unknown
  modified_base (6): a, t, c, g, other or unknown
  modified_base (26): a, t, c, g, other or unknown
  modified_base (49): a, t, c, g, other or unknown
  modified_base (121): a, t, c, g, other or unknown
  modified_base (137): a, t, c, g, other or unknown
  modified_base (154): a, t, c, g, other or unknown
  modified_base (169): a, t, c, g, other or unknown
  modified_base (197): a, t, c, g, other or unknown
actngntacagttcagtgttgtgggnggttggttttccttagcgtttanaatagccatcattgtcctgcaataggcagagctatcacgtccaggaaaaatgaggggaaccagaggcagcgngagatccaaatacagnattcaaaggtaattggnccagtggtgcctggngaggaggaaggggatgatactccagggntagccatcttccttcgggggtgtgt

SEQ ID NO: 858 - DNA, 255 bp, Rattus sp.
atggccaggcttggctccaggtaggatggatttcactggaagcgggagcttgctccctctgggactctgaatgggcttatagtcaagacctttaatcatgctaagagccagctccagtttgtggttacacaaaagctgtggagtctgttcctcagaatagtagtcacactttacaagttctttcgaacttctctccgtttcctcatctttctgttgtggaggactagcctggacactagcatccagagattccac

SEQ ID NO: 859 - DNA, 255 bp, Rattus sp.
acccttattggatattctccagaaggaataccgctctatcacttcatgggtgatgcttttcagcacagctctcagtcggtccctaggtttattaaggactcactgaaacagattcttgaggagagtgactctaggcagatcttttacttcttgtgcttgaatctgctcttcacctttgtggagttgttctatggagtgctcaccaacagtctgggcctgatctcagacggattccacatgctctttgactgctcc

SEQ ID NO: 860 - DNA, 255 bp, Rattus sp.
actccataatggatgtgagccagagtgaaggcagcagtgagtgtgtaaaggagaacactctcaaggcgggaggttgttgtgcctacgatcacagttgccacgaccaagaagagaggaagcagcaaccagttcaaagttgggcaccgtgtgctgctcatttggcaaacgattagctgacatgtgatattggcaaaagctgttccgaccatgaagtagaatattctagggtgcatttctaaaatatctgaaggtgac

SEQ ID NO: 861 - DNA, 255 bp, Rattus sp.
  modified_base (1): a, t, c, g, other or unknown
  modified_base (3): a, t, c, g, other or unknown
  modified_base (7): a, t, c, g, other or unknown
  modified_base (10): a, t, c, g, other or unknown
  modified_base (42): a, t, c, g, other or unknown
  modified_base (50): a, t, c, g, other or unknown
  modified_base (64): a, t, c, g, other or unknown
  modified_base (73): a, t, c, g, other or unknown
  modified_base (88): a, t, c, g, other or unknown
  modified_base (111): a, t, c, g, other or unknown
  modified_base (119): a, t, c, g, other or unknown
  modified_base (127): a, t, c, g, other or unknown
  modified_base (132): a, t, c, g, other or unknown
  modified_base (137): a, t, c, g, other or unknown
  modified_base (139): a, t, c, g, other or unknown
  modified_base (142): a, t, c, g, other or unknown
  modified_base (148): a, t, c, g, other or unknown
  modified_base (158): a, t, c, g, other or unknown
  modified_base (161): a, t, c, g, other or unknown
  modified_base (163): a, t, c, g, other or unknown
  modified_base (179): a, t, c, g, other or unknown
  modified_base (183): a, t, c, g, other or unknown
  modified_base (197): a, t, c, g, other or unknown
  modified_base (212): a, t, c, g, other or unknown
  modified_base (217): a, t, c, g, other or unknown
  modified_base (228): a, t, c, g, other or unknown
  modified_base (240): a, t, c, g, other or unknown
  modified_base (243)..(244): a, t, c, g, other or unknown
  modified_base (247): a, t, c, g, other or unknown
  modified_base (250): a, t, c, g, other or unknown
ngnaccnganacactgggagaagacacatatatggtaaagcnggcactcngagctggctactcnacaataganctgaagcacaggcantccatatggtggcccctatccgnggaacttnattagganctagngcctnanaanctgctnccacagattncananagggcctagctgaggncagngaaacacaaggcangggccctgaagcggngctgncaaaagcctcngaagctaccgtntgnnccnacnatagc

SEQ ID NO: 862 - DNA, 153 bp, Rattus sp.
acctaccaggtgaaacctttgtcctgggcaatagcctgacgaggtccttggagacacactcagacctgatggactctgccttgaagcctgccaacctcgtcagcacgtcccagaccctccggactcctggctatcggcccttgcttccctcct

SEQ ID NO: 863 - DNA, 134 bp, Rattus sp.
  modified_base (49): a, t, c, g, other or unknown
acaggccctgcccagtgtttgtccctgaaccccccacctccatagctgntaatggctgaatgaggaaagttctggaatatgatgcttaaataatgcattatatcccagtgtgatgtgtgctttggctcgttagt

SEQ ID NO: 864 - DNA, 255 bp, Rattus sp.
ttggcttccatgttttgggaaatttgagagaggaatggagttcttactggaatgtggcctatcgctggctgacagatctgaaatggaatgtctccaatggcagtgtctcccttctgccctcccttggagcaagccagtgagcagctgccctgccggctgtgggggtggcgacctcaggcagccatcttggccagctgctgttctagctttgaaatgcgctcgtcttgattgcagattgtgtcctttatggatttg

SEQ ID NO: 865 - DNA, 209 bp, Rattus sp.
  modified_base (33): a, t, c, g, other or unknown
  modified_base (136): a, t, c, g, other or unknown
actcacagaactgggagataagcaggctgtggncatcctctggtgtgagcaggcctcctaccactgccctaaagagtgtgcgggggaagaggtagtggctttcccactggggcttctccaggggtttcgctccttncagctgcacgaacttcatgagcgtctcgagggccagttccttgacctggaaggagggatgggtcaggagttcc

SEQ ID NO: 866 - DNA, 46 bp, Rattus sp.
gcaggtggcgcgggtgccggctgagcgcgggaaaccgagagagcgg

SEQ ID NO: 867 - DNA, 255 bp, Rattus sp.
accccatgaggattgatgagagcatacacctccagctgcgggagaaatatggcgacaagatgctgcgcatgcagaagggcgacccccaggtctatgaggaacttttcagctatgcctgccccaagttcctgtcgcctgtggtgcctaactacgacaacgtgcatcctaactaccacaaagagcccttcctgcagcagctgaaggtgttttctgatgaagtgcagcagcaggcccagctctccaccatccgcagct

SEQ ID NO: 868 - DNA, 255 bp, Rattus sp.
acgactgtggggtaggggcaaaatgacaccaaattccagccccctgcagtgtaatttctggggtttgaattcaccttagaagggacactgtattcaaactcacgtcaaggcactgtgtggacgagctgtagccagaactgtcaatactatcttctaacttacccctggccagaaggtttctacagacagtgattctagggtgagaactgtcttagtgtgtgcagtatcctgcataaaagaacaaagctgtcatca

SEQ ID NO: 869 - DNA, 255 bp, Rattus sp.
acagaggcagtggaaagatgtggtggaacgggcgtgccaagcgagggctgaagaagtgtgtgtgcagatctccaacgattatgaagccaaacttgctatgttatctttagctttggaaaatgcaaaagctgagattcaaagaatgcatcaagaaaaagaccatttcgaagactccatgaagaaagcattcatgaggggagtgtgtgcattaaatctggaagccatgaccatatttcagaacaaaaatgacgcagg

SEQ ID NO: 870 - DNA, 255 bp, Rattus sp.
acagaaagtgcgtgtggtaatcggcatagacaaagaagtcatcgcctacttggttgtccagcaccgcatggctgttctggaagtaatttaacacactcataatggtgcagttcttgttgtatggagagaggggggccacacagatgtcctgaagtgtcacggtttcattgttataggacgcagtgatactttcaatggcgatctgtaagtccagaacctggtgcagaatctctttgttcaatggaggcccgaagg

SEQ ID NO: 871 - DNA, 255 bp, Rattus sp.
acaaggcctgcttcttcggagtgtcatcgtcctgaggtaaggaggagccaagcttttccatgtattcaatttcataggagtttctgtagtccagctctggctggcaagaatcttttctgggtctttgccccctagggtcagtattctccaaggcaaggtgtgggtctggctggccactgagttgcttaccctccgagggtgaattgaatttggtctcatttacaaagttagataggtctgagggctgcgggaaat

SEQ ID NO: 872 - DNA, 255 bp, Rattus sp.
  modified_base (7): a, t, c, g, other or unknown
accttgntttgatcatttccacagcacatttctcctccagaaacgcgaaaaacacaagcgtgtgggttctgcatttttaaggataagagagagaaagaggttgggtatagtaggacaggttgtcagaagagatgctgctatggtcacgaggggccggtttcacctgctattgtcgacgcctccttcagttccactgcctttatgtcccctcctctctcttgttttaactgttacacatacagtaatacctgaata

SEQ ID NO: 873 - DNA, 255 bp, Rattus sp.
acataaaaggaccccatacatcatgctggtaaaataggacattcagaatgcacacacttctgttttttctcttatgtgataggtagattcttaatgttaagcatttttattttgtgatttactccatttgtaacttaatagtcttggatttaaatttacaatttgccctgtttggtattttgttttaatttggaaaggataattggaagttaactgaaataatggaagttgaatttatactctgcatttttatat

SEQ ID NO: 874 - DNA, 238 bp, Rattus sp.
  modified_base (209): a, t, c, g, other or unknown
actactaagaaatgggacaagtcactgaggacttcagcggctggggtccccatcccagataagtccaccccccaccaccaccacacaccacacacacagggatgctctgggaagcccgtctcgtcaccaaggacctaccctagacccataagaagggcagttgccactggagctgcctgaggtaggaccaggaaaccccacttagtgtncctgcccgggcggccgctcgaaagccgaa

SEQ ID NO: 875 - DNA, 255 bp, Rattus sp.
  modified_base (148)..(149): a, t, c, g, other or unknown
  modified_base (158): a, t, c, g, other or unknown
  modified_base (165): a, t, c, g, other or unknown
  modified_base (168): a, t, c, g, other or unknown
tactcgcgcagtmatgtgtcttctccttctacacactgggagtcatgtctggagctgcagaagaagtggctacaggagcagaggtggyacatccgcyggcggccatgtgtagagcagctttggagtcccctagaaaatagcatcatcnncgagccttnatccctnctngttggtggaccccacttgatcccaagactctggcctttaaccctaagaagaagaattatgagcggcttcagaaagctctggatagtg

SEQ ID NO: 876 - DNA, 255 bp, Rattus sp.
acacctagggcagctcgaggcaagcgatctttaacaagatctcctccagccatccgtagcggtctgcatctggragtagttctgatcgctcacgttctgccactcctccagcaacaaggaatcattctggatctcggacacctcctgtagcacttagtagctctagaatgagctgttttagtcgtcctagcatgtcaccaactcctcttgaccgatgtagatcacctggaatgctagaaccccttggaagtgcta

SEQ ID NO: 877 - DNA, 254 bp, Rattus sp.
accaccatacttctgggctctctctgctttgtccctttcaattttctctcgaaccctttgtctggcagcagctcttcagccttctccctcctgcgckcctcagcagcccggcgtatctcatcttcctgtagtttctgtcgtgcagctgacagctcttgcccttgtctcctccgctgcttctctcgttctaaagcttctcgctcctctctttcttcacgttcccgctgcttctgcgccacaagttccaamattct

SEQ ID NO: 878 - DNA, 254 bp, Rattus sp.
  modified_base (85)..(87): a, t, c, g, other or unknown
taccaggatgtaaacattattggtttttgattcacagtcttggaaggatggcctgtctttaggctcagaactccagcmatgcgcnnnaactccttcagyccttctaagccaggagtctcagggctgtccggaggcagctctgtcaatggaggtcgcctctgcctgttacacactgctccacgaattagtgaggtcttgtctaccacctcagcttctcttccagccagcactgtccacacgaggaccccaaaact

SEQ ID NO: 879 - DNA, 255 bp, Rattus sp.
acatatctctatattattatatatcaacttacatatatacatatatttttmggggtggtgggaaatgggtgtggctacctccacctgctttcmcgtgtmacamgcctgaagggctgcttagggcttgatacagggtcattgtgagaagtgtgcaccatgactcaggactcaacctggcatgcagccacccaggcccatcccacacatgtatgtgacatgtagacagacacctgccattgcctacacgctaccctg

SEQ ID NO: 880 - DNA, 255 bp, Rattus sp.
  modified_base (59): a, t, c, g, other or unknown
  modified_base (86)..(87): a, t, c, g, other or unknown
  modified_base (90)..(92): a, t, c, g, other or unknown
  modified_base (97)..(98): a, t, c, g, other or unknown
tacgcacggcccgctatcctggcagctgcttcagcagtcgctgcctccaccttacttgncaccacggcgmcmcacmcyscmycgcnncannncccannggccacargygctccaggcacagctgcaagtcctctcctgagcccgtaagaaagggacccacagtaaactgaccatgctgcatggtggccccaggcactctggggctgatggtcctagtataagataaggctgcctcagacgtccttgccaacccaa

SEQ ID NO: 881 - DNA, 254 bp, Rattus sp.
  modified_base (85)..(88): a, t, c, g, other or unknown
  modified_base (91): a, t, c, g, other or unknown
  modified_base (94): a, t, c, g, other or unknown
  modified_base (100)..(101): a, t, c, g, other or unknown
  modified_base (103)..(108): a, t, c, g, other or unknown
cacatgasgccatgagcatctcagggctcctcctggaattccctcatcttcactgtgtcgtaaaaaamrcagawgarawtgcaannnngcnccnccaccnncnnnnnnaaaagagttgcccgcatggccgtstcctcttccgaataggccagaatggtccttaaggactttctcaggtgctcctcattgaagtctggtgctttgcctaccaaggatgccagtgccatggttacctgcatctttactcttgcaaa

SEQ ID NO: 882 - DNA, 255 bp, Rattus sp.
  modified_base (82)..(83): a, t, c, g, other or unknown
  modified_base (92): a, t, c, g, other or unknown
accaggaccctgctgcagtttcctttgtcacgaattttactataatttatgttaagatgggctatcctcgccggccagkggnnaaacaatgngagcgcggcccctacgcttcttactgccatggaagggaaacctcagccacagcaggacagcttaatgcatcttttaataccaactctttttcacatgaaatacccggctgaatcatccaaatcagcttctccatttaatcttgctgagaaaccaaagactgtg

SEQ ID NO: 883 - DNA, 255 bp, Rattus sp.
tacacctagggcagctcgaggcaagckatctttaacaagatctcctccagccatccgtagcggtctgcatctggaagtagttctgatcgctcacgttctgccactcctccagcaacaaggaatcattctggatctcggacacctcctgtagcacttagtagctctagaatgagctgttttagtcgtcctagcatgtcaccaactcctcttgaccgatgtagatcacctggaatgctagaaccccttggaagtgct

SEQ ID NO: 884 - DNA, 255 bp, Rattus sp.
acctcttgccttatcagcctgccatggccaatcccacagggaacssgagggaaggaggatgttggctgasaaasmsgagagatasamacagaagagggggagtgaatggacccagtgggctgtcttatttcaaagtggttgtgtatgattcttatactacatctatatagagatattaaggccctctgagttaaagaaactsycctcatcccgtgctgttcactcatgtttgtaaaaattgttccatgctaacat

SEQ ID NO: 885 - DNA, 220 bp, Rattus sp.
  modified_base (86): a, t, c, g, other or unknown
  modified_base (88): a, t, c, g, other or unknown
  modified_base (144): a, t, c, g, other or unknown
  modified_base (159): a, t, c, g, other or unknown
actgtccacacacctggawgacgtgcggcgccagaacatcgamaagaaaactgagaagatcctgagagagttccttmstthcmatnangaccagtatggtgtctccctcttcaacagcatgcgccatgagattgagggcaccgngcctccgcagcachnhtgctctggcgcaaggtgcccctggatgaacgcatcatcttctccgggaaccttttccagt
